United States Patent Application Publication US 2018/0363030 A1 - sequence listing, part 2

SEQ ID NO: 1 - DNA, 5419609 bp, Enterobacter aerogenes (residues 1,806,538-3,613,074 of 5,419,609)
  misc_feature: EA1509E
cgaccagcttatcgcgcaccgccgcccagctggcctccttacttggctgcaggctgatgccatactttttatcgaattctttcaatgccgcaatcgccagcggcgcgcagtcggttaacgggatgaatccgacccgcacggtggccaactctggcttatcggaacccgccgcccacgccgcctgcatcacgccgggcagcagcatagcgccgctcagcgccgccccggcctgcaaaaagcgccgtcgtgaaatgaaaactttatcgcccatagccgctccagaacgcgcaaaaaaaagcgcccggcagtgctttcgcaccgcaggacgcctttatccagagaacttcagaccgccgttggtccgttgtctcaaattgttgattcactcaagttcagtaatgcaaagcggatgccaatttgtgttattgcccgccagacgttgttttaccgctctccgcgtcaactattgcaccatcgtcaggcaatgcctgcccgctgattgtgcattcaatttgacgatgagtccggcagcagagctttcaccgtcagcagcgcgcgggctatttcgaccatccgctggttcttatccatcgccattttacgcaacgcctgccaggcctgttcttcctgcattccctgatggctcatcagcagcgctttcgctttatctataatcttgcgctcctcaaatgcggcttgcagcgaggccagttggccggagagttgctcaagttcccacgcctgctggcggaccagcggcagcagctgcttatccaggcgcaaagtcaggctatcgccgcactcttcttcaggccattgcagcggcggcatatcgtcttctccacgttcgagcagttgccgggtcgcgctgagcaggtcggcaatcaacgcctcctccagactgcgcatctgctctagccgttcagtttgcaggctaaaccagcgctgcgccgcggccccttcgtccgccgagggctggcgggtacaggctatgcgccgcagttgctcaatctcgcgcccggcttcgcaaccctgcagcagctcaagcgcccgcggcagaccggagagcgcctgaaagctgtcaaaacagggctgctgaccgtcaatgcggtcaaccaactgctgacggagctcgccgttaaattggccgcgcgcaaagcccaacgctcccagcgcgcgctcctggcccgccagctctttaccctgcataaagctgtacagggcgaccatgcgcccggcgatctgcggatcgtctatggtgtcattcaactgcggcacaatattcaataaatggcgaataatacggctaaagcgctgagtggcctcctgagcgtccaccgcacggccttgcaccgccgctcgcagcgccggaagctgcgccagataccacaccgcgctggctatacgccaacacagcgcgctgctggcggattcccgcgccggttgcagcgcggcataaaaagcgcttaagcgcgcgtccaccagcgccccgcccgcccgacgctcggcgtcatacaagcggccctcggaagagagccacatattggaggcgccgcgttcgcactgcagcatatggaccaacccacttatttcgctcgccagcgtcccttgctgcgttagcttgcggagctgctgtttttgtagctggcgcgcataatgaaaccagccgattgcttcaggcgtcatgccggtcgtattattcataccccctcccgaattacgtctttagataaagctaagcaataaccatgcctgataaaaggagtctttatgcaacgtattgtgattgtcgccaacggagccgcttacggcagtgaatccttgtttaatagcctgcgcctggctatcgccctgcgtgagcaggagtcagacctcgatctgaagctgtttttaatgtccgatgcggtgaccgccgggcttcgcggacagaaaccggcggaaggctataacatccagcagatgctggagatcctcaccgcgcagaatgtgccggtaaaactctgcaagacctgtacggacggacgcgggatcacccatttgccattagtagatggcgtggaggtgggaacgctggtcgagctggcgcagtggacgctggcggcggataaagtgctgaccttctgaattaaccgccattaacaggattaaatgtcaggctggtgggcattgctgatgcaaaagtacgccagctgaacgctttcaggaagattgtcatttttgtttaatcgttatccattttgttgatcgaaatcatcatccacacgctccccctttggtgttatgcaacgagcaaagtgtgaacaatatcacgcgcgggttgatgaattcagagacagaaacggggtatgaaaatggcaatggtaaaagcaagtttaacgttattcggcggtgatacgctggtggtgcgctgttcagagcgctgtcatattcacttaatgagcgccaaggccgccggcgacagccacgccgatatttttagcgtgcaggacagggacagcgcttatctcaccgtgccctacagcggcacctggaacgtgctgatcgacagccatagtcagtccctcgagcactccattagctacgttcccgcctgaatctccacgcccggtagaccgggcgttttatgcgagcccaggttggctcgcctcgccgaccagatgtcgcacctggataatcagatcgtcaagactggcgtcgcgcatgccaagcttgcgtaattcctgatccaacgaaaagagatactgggcattggtgccgagcggcccgctggcgcgggctatcagcggcgcaatggtttttgcgctggtatcagattcatacagtgggtggcgcggatccataataaacaccagcgcattcaccgtgcggccgtcatcaagctccagacggcaccaggttggcaaatagcagccggtgatcatttctcgcttccacagtaacgtcagctcttgctccaacgtctcatccggcagacgataggccacgccggtggtacggccgccttccttcaacgccagcatcctgcccggctgatgcgcgctgccacgaccggcggtcaggcgcaggcaaaacgcgcgatgccaacccggcagcgtaccggtgcaggattcgctgtattccagcgccgggttccacatcaacgaaccgtagccgaaaatccacaccgaaccgttatccggacgacaggccagagtcgccgccaacgaggccgcccgctgctccgccgaccacagcagcgattcctcaatcgcgccaaacgccgttttacaatccgcattcattaagaaatcacgagttaacactttctactacctccgccactgcctgcttcccggcgataatctgtgccatccgtgaatattgctgaattattatccagctttattactcaataagcaattaacggagcgttgacaagggggctgacaaaaaattagatcgcaaaagtgattactttttcttatgccatttgtcgtcatcgcctttttggtaatcatttttcaccgccgcccaggcgactttatgcgccgtctcctcacggctggcatcatcgcgacggtcggctttatctttatattgatcccacgcgctattgaaagcttctttataaatttcctgcgcgtgttccggcaagacgtgctgaacgctatcgggaagttcttgtttactacggtaaggcataatgacctccagaatcagggtaaaagctaagtctggaacacaattcccgggttggcaaatgacaggaatattgagaaatgaattttagtaatcatctgaaaaatatgtataaaacatacgtaacagcgttttttagcagaccaacgcatttcttatgcaagagtggtaaatttaagtaaaaatacaaattaaacctatcaatgtctgttattttatcaacttacgttatctataattataacacctgcataaatggagatggttcatgacacatgcacatgaggcggttaagacccgccacaaggagacctccctcgtttttccggttttagcactggtggtgctgtttctctggggaagcagtcaatcactaccagtggtcgttgcgattaatattctggcgctggtcgggattctgagtagcgcatttagcgtggttcgccatgccgacgttcttgctcaccgcctcggcgagccctatggttcattaattttgagcctgtcagtggtcattcttgaagtgagcctcatttccgcattaatggcgaccggcgacgccgcgccaacgctaatgcgcgatacgttatattcaatcattatgatcgtcaccggcggtctggtcggcttctctttactgctgggcggacgtaaattcgccacgcagtatatgaatttgtttggtatcaagcagtatctgatcgccctcttcccgctggcgattatcgtactggtattcccgatggcgttaccgggcgccaatttcagcaccggccaggcgctactggtggcgctgatttccgccgccatgtatggcgtattcctgctcattcagaccaaaacgcaccagagcctgtttgtgtacgagcatgaagatgacagcgacgatgacgacccgcatcacggtaagccctcggcgcatagcagcggctggcacacggcctggttactggtacacctggttgcggttatcgccgttaccaaaatgaacgctaatccgctggaaacgctgttgaccagcatgaacgcgccggtggcctttaccggtttcctggtggcgctattgattctctcgccggaaggactcggcgccttgaaagcggtgctgaacaaccaggtacagcgcgcgatgaatttgttcttcggttcggtgctggcgacgatttccctgacggtgcctgtcgtcacgcttatcgccttccttaccggcaatgaactccgcttcggtttgggagcgccggaaatggtggtgatggtggcgtcgctggtgctgtgccacatttcgttctcaaccgggcgcaccaatgtccttaacggcgcggcgcatctggcgctgttcgccgcctacctgatgacgatatttgcctgaccgggtaatccgtaataaagcccaaaaaaaagcctgtcggtggcgaaaccggcaggcttttttacagctcagcgaaacttagttgctggtatccagctcgtcgaagcttttcaccagatcgtcgatcgctttcatttgcttcaggaacggttccagtttagccagcggcagcgcggacgggccgtcacatttcgcgtgatccggatccgggtgcgcttcaatgaacagaccggcgatacccaccgccatcccggcgcgagccagttccgtcacctgagcgcggcgaccgcctgaagcagcgccaaacgggtcgcggcactgcagggcgtgggtcacgtcaaagatgaccggcgagttgttggacgctttcttcattacgccgaagccgagcatatcaacgaccaggttgtcgtagccgaagttagcaccgcgatcgcacaggatcactttgtcgttcccgccttcaatgaatttatcaacgatgttgcccatctggcccgggctgacgaattgcggtttcttgacgttgatgacagcgccggttttagccatcgcttccaccaggtcagtctgacgcgcgaggaacgctggcagctgaatcacgtcaaccacatcggccaccggctgcgcctggctggcttcgtggacgtcggtgatgattttcacgccgaaggtctgcttcagctcctggaaaatcttcatcccttcttccagacccggcccacgataggagtggatggaagaacggttggctttatcaaaagaggctttgaacacatacggaatgcccagcttttgcgtgacggtcacataatgttcgcagatacgcatcgcaagatcgcgggactccagcacgttcattccgccaaacagcacgaacggcaggtcgtttgctacgttgatatcaccaatgctaaccactttttgtttcataagatcgccttatcagggtgtaaccggaatggttccagactaatgcaatgtaatttgtttatgtgaaatcgtgttgatctgcgcacggatcatctcgctaatcggatcctccggacactgctcaacgaaataattgagatccagcagcgccacgtgatcgcactccagttgggcatagataagcccgcggtcgcgaatttcataagggtcttcgggattgaactgcagcagcgcttcgctggcgcgtagggccagctccatctgccgctcttccatcaacgccgatttcagcgtatcgagcagtttgcggatcacttcggcgttatcggcctcatcgagatcttcattgaacagttctgccaccgggctgatattccccttcagccacacctcaagcgtgtgttcatcaagcgtctcgccgttgaatgggttaatcaaccacatctcttcgctggcttccgggtcggcgcgcagcagcatctgcgtggggaaaataaccggtaccaccggtaaatccagacgctgggcaatccataacagaatcgcccccagcgacacggcgctcccctggcgattcaccagcactttatccagccataacgcatcggacagacgataaatgccctgcgacgcgccgaagccccactcgtgatagaacaattccagcagccggtcgagctgacgctcctgatcccaggaggtggcaatctcttcctgcgccagtgttaacaaccgctgcaactcatcctgcacaaagtgcgtcggaaagtcgtcgcggatcaattcagaaatgaggaccatgccttcgcataatggcgctttgttaaattcgaaatcagctaatgacctcatgccttaccccagtaacggtattcttgtgatggcgagttgaacgatgaagaacaacaccaccagcgccagcagaaaggcgatgaaccgggtctgctggcggcgcgggcgacgtcggcccaacgcaataaatcctaatgcgatgtaaatgataacgccaaacagcttttcagtcagccatgcgccatcttcggtaaacggcagatagtgcgtaatcgccattaatcccgcgccgctgagaaacagcagcgtatcgctacaatgcggcgcgatacgcacccagcgctggttgagcatcgcgctgccgctgtaggtccaccagtaacgcagcacgaaaagcccgacggatgtcaccacgcaggcaatatgcaaatagagtactgcagtaaataaattcattcgccggcttgctccttgtgcggccaacgcccgagagtcagacgttcgttatcgccataatcgcggcaggtctcgacatcgagataacctgcttcattaaacaatgcgcgtaccgcctcgccctgcttccagccatgctccagtagcatataagcgttgggtaacaagtactgacgcccttcacggatgatatgcgctaaatcggccagcccctggtcggcggcgaccaatgccgttctcggctcaaagcggacatcgccctcggcaagatgcggatcggtttcatcgatataggggggattactgacaatcatcgcgaacctctgccccttgagcgcgctaaaccagtcgctctgcagcacggtcacgttgttgagagcgagatgggcggcattgcgcgcggcgagcgccgcggcgtcaggcataaaatcaacggcagtaacctcgcagtccgcccgctcgctggccaacgccagggcgatagcgccggtgccggtgccaagatccaggatacggcaggccgtctgcggcaagcgtaccagcgcctgctcgaccaggcattcggtgtcgggccgcgggatcagcgtcgccggcgagacaaacagcggcagcgaccagaactcgcgctgaccaaccagatgagccaccggctcgccgttggcgcggcgcgccagcaatgtttccagctccgccaactgttccgccgtcaatacggtttcgtcaaaagcgaggatccaggtccgcgctttgccggtgacgtgccccagtaaaatctcggcgtcgcgacgcgggctgtcgctcgcgccgagccgggctattgcctgagtaagccactgtcgaaaggtcatcattcctgctcggaaagcgccgccagctggtcagcctggaattcctgcacaatcggttcgatcagcatatccagtttgccttccatggtttcatccagacggtaaagagtcaggttgatacggtggtcggtcacgcgcccctgtgggaagttgtaggtacgattgcggtcgctgcggtcgccgctgcccagcaggttacggcgggtagacgcttccgcctgctgacgcttggcgacttcggcggcgcgaatacgcgcacccagcaccgacagcgccttggctttgtttttatgctgtgaacgttcgtcctgacactcaacgacgataccggtcggcaagtgggtaatacggatagcggagtcggtggtgttgacgtgctgaccgcccgcgcccgaggagcggaaggtatcaatacgcaggtccgccggattgatatccggcatttcggcttccggcagctccggcatcaccgccacggtacaggcggaggtgtggatacgcccctgggattcggtcgccggaacgcgctggacgcgatggccgccggattcaaatttcagccgcccatagacgccgtcgccgctgatcttggcaatcacttctttaaatccgccatgttcgccttcgttggcgctcatgatttcgacccgccagcggcgggcttcggcgtagcgggtgtacatgcggaagagatccccggcgaacagcgccgcttcatcgccgccggtaccggcgcgaacttcgacaaaagcgttacgttcatcgtccggatctttcggcagcagcagcacctgcagctgttgttccagcgcttcgcttttttctttggcatcgcgcagctcttcctgcgccatttcgcgcatttccggatcgtcgagcatcatctgcgcggtttcgatatcgtcctgcacctggcgccagtcggtatagcagcgggcaacatcgccaagctgcgcatattcgcgcgacagcgcgcggaaacggtcctggtcggcaatggtggcggcgtcgccaagcagcgcctgaacttcttcatggcgttcgtacagagcttccagtttagcaacaatagaaggcttcataggcgtgaattcaccctgtctttaaatagagaaatgtgcgctattccagcccgaggctgttgcgcagaatatgcaggcgttcatcatccccgtcacgggcagcctgctgaagagatttggttggagcgtggatcaggcggttggtcagcttacgggccagatcttgcataatttcctgcgcatcgccgccctgctccagcgcggcaagcgctttcgccgtcagctcctcgcgaacctgctcggattgggaacgatattcgcggatagtctcgctggcgctttgggcgcgcagccaggccataaattcgctggtttcctgctcgacgatcgattccgcctgcaccgccgcggccttacgctgcgccagattgtgctgaatgatattttgcaggtcatcaacgctgtacagataggcgttggccagcttgccgacttccggctcgacgtcgcggggcaccgcgatatccaccagcagcatcggctgattgcggcgcgccttcagcgcgcgctcgaccatccctttgccgatgatcggcagcgggctggcggtagaactgataataatatcggcgtcttttaaacgctcgtcgatatcgctgagggcgataacttccgcgccgacttcatccgccagcgcctgggcgcgttcacgggtgcggttggcaatcaccattttgcgaacgttatgttcgcgcagatggcgggcgaccagttcgatagtttcccccgcgccaaccagtaacaccgtgacgctggagagcgattcaaaaatttgtcgcgccagcgtacaggcggcgaaggcaacggaaacggcgctggcgccgatatcggtttcagtacgcacgcgcttagccaccgaaaacgatttctggaacatacgctccagttcgctgacgttcagatggccgcggctggaatctgcaaacgcttttttcacctgcccgaggatttgcggctcgccaagcacgagtgaatccaggccgctggcgacacgcatcagatggctgacggcgtcgttatcctgatgccaataaagacttttacgtaggtcttcttcattcaggccgtggaagtcacatagccagcggatcagcgcttcctgcaggttgtcctgctcttcaacgctgagatacagctccgtgcgattacaggttgataacaccaccccgccctgcaccatcggctgagccaataagctctccagcgccttgtcgagcgtatccggcgaaaacgttacgcgttctcgcagcgctaccggagctgttttgtggttgatgccaagagctaaaagggtcatggtgagggaatagtaccagcgttgctaaggttagtctgagcgcatcatacaggatgcgcgtactcaataaaagagacgccccccttttggagtaatagtcagggcttaatagccactaacggtaattttttgatttcagacaacttgaacgtagacgctatcggccagcgacgctagcattaagggttattattgcaacccgctacacaaatcggtgtgcgaaccatcagtcgccgcatttcactgtagacatcaaggatttgtcatcattatgaatcgactgttccgcctgctgccgttggcaagcctcgttctgaccgcctgtgcaatcaatactccgccgcaagggcccggcaaaagcccggactccccgcaatggcgccagcaccagcaggatgttcgcaaccttaaccagttccagacccgcggggcgtttgcctatctttccgatgagcagaaagtgtatgcccgtttcttctggcaacaaaccggccaggaccgctaccgcctgctgctgaccaacccgcttggcagcaccgaactgtcattaaccgcgcagccgggcggcgtccaattgattgacaacaaaggccagacctacaacgccaccgatgccgaagagatgattggccgccttaccggcatgccgatcccgcttaacagcctgcgccagtggattatcggcctgccgggcgatgccaccgactattcgctggatgaccagtaccgcctgcgcgaactcaactacacgcagaatggtaaaacctggcacgtgacctacagcggctactccagcgacaccaaacccaccctgccgtctaatatggaactcaacaacggcagccagcgcatcaagctgaaaatggataactggattgtgaaatgatgagtcgctggcccgcccccgcaaaattgaatctgtttttgtatatcaccggtcaacgcgccgatggttatcacacgctgcagacgttgtttcagtttctcgactatggcgacacgctgaccattgaaccgcgccgcgacgggaaactgcggttgttaacgccggtcgccggcgtgccggatgaagagaacctgattatccgcgccgccaggctactgatggcggcggcggagtctcacggtcaactccccgcaggcagcggcgcggatatcagcatcgacaaacgcctgccgatgggcggcggcttaggcggcggctcttctaacgccgcgacggtgctggtagccctcaatcatctgtggggctgcgggcttagcgaagaccagctggcgacgcttgggctacagctcggcgccgatgtcccggttttcgttcgcggtcacgcggcgtttgccgaaggggttggcgagattctcaccccggtcgatccgccggaaaaatggtatctggtcgcccacccgggcgtaagtatcccgacgccgatcatttttcgcgatccggagttaccacgaaataccccgagcaggtcaattaataccttactaaactgtgaattcggcaacgattgcgaggttatcgcaagaaaacgttttcgtgaggttgatgcaacgctttcctggctgttagaatacgcgccgtcgcgcctgactggcacaggagcctgtgtgtttgctgaatttgacaccgaatccgccgctcgtcaggtgctggaaaaagccccggaatggctgcaaggctttgttgcgcgaggaataaatgtctcgccgctgaagcaagccctactgaagtaattctgctttttgcatgaataacggcaagtttgccgggcaaacagagtatcggtgacaacgtcaccctgttccagacgttgcatcgtgctctttaatacaccgcctggatgagatggcgccggcccgcacagtttaatggcccgtttcatccaccactggacgcatgcctgaggttcttctcgtgcctgatatgaagctttttgctggtaacgccaccccggaactagcacaacgtattgccaaccgcctgtacacttctcttggcgacgccgctgtaggtcgttttagcgacggcgaagtcagcgtacaaatcaacgaaaacgtacgcggtggtgatattttcatcatccagtccacttgtgctcccaccaatgacaacctgatggaattggttgttatggttgatgccctgcgtcgcgcttctgcaggtcgtatcaccgctgttatcccttacttcggctatgcccgccaggaccgtcgcgtacgttccgctcgtgtgccaatcaccgctaaagtcgtcgctgacttcctgtccagtgtcggcgttgaccgcgtactaaccgttgacctgcacgctgaacagattcagggcttctttgatgttccggttgataacgtattcggtagcccaattctgctcgaagatatgctgcagctgaatctggacaacccgatcgtggtttctccggacatcggcggcgtggttcgcgctcgcgctatcgcgaagctgctgaacgataccgacatggcgatcatcgataaacgccgcccgcgcgctaacgtttctcaggtgatgcatatcatcggcgacgtcgctggccgtgactgcgtgatggttgatgacatgatcgataccggcggtaccctgtgtaaagcagcggaagcgctgaaagaacgcggtgcgaaacgtgtcttcgcctacgcgactcacccgatcttctccggcaatgctatccagaacattaaaaactctgtgattgatgaattcgtcgtctgcgataccattccgctgacgccggaaatcaaagcgctggacaaagtccgcaccctgaccctgtcaggtatgctggccgaagcgattcgtcgtatcagcaacgaagaatccatttccgctatgttcgagcactaatcgagcccagccgaaaaacccgctgcggcgggtttttttgtctctggttcatatttgtatgactaatgcctccttcacctgccattcagttgacagatgatgcgctcatggatgaaacattattgtgaatagattattttcctcacatgtgatgcctttccgcgccctcatcgacgcttgctggaaagaaaagtacaccgcatcgcgctttacccgcgatctcatcgccgggataaccgtcgggatcatcgctatcccgctggcgatggcgttagcaattggcagcggcgtagcgcctcaatatggactctacacctcggcggtggcgggaatcgtcatcgccctgaccggcggttcacgctttagcgtttccggccccaccgcggccttcgtggtgatcctctatccggtgtcacaacagtttggcctggccggcttactggtggcgacgctaatgtcgggtatcttcttaatccttttcggcctcgcccgctttggccgtctgattgaatatatcccgctttcagtcacccttggctttacctccggtatcggcatcaccatcggtaccatgcaaattaaagacttccttggtctgcagatggcgcatgtcccagagcactatctgcagaaagtcggcgcgctggtgatggcgctgccgacaattaacgttggcgatgccgccatcggtatcgtgacgctgggtattctgattttctggccgcgtttgggcatccgcctgccggggcacctgccggcgctgctggcgggctgtgcggtgatgggcatcgttaatttactcggcggacatgtggcgaccatcggctcgcagttccactatatcctcgccgatggcagccagggcaacggtatcccgcaattgctgccgcagctggtgttgccgtgggatatgccgggctcggagttcaccctgagctggtcgtcgctgcgcgcgctgctgcctgccgccttctctatggcgatgctgggcgccattgaatcactgctctgcgcggtggtgctcgatggtatgaccggcaccaaacacaaagcgaatagtgagctggtcggccagggcctgggcaatatcatcgcgccattctttggcggcattaccgccaccgcggcgattgctcgctccgcggctaacgtgcgcgccggcgcgacctcgccgatttccgcggtgatccatgccctgctggtgatcctcgcgctgctaatcctcgccccgctgctctcgtggctgccgctgtcggccatggctgccctgctgctgatggtagcgtggaatatgagcgaggcgcataaggtgattaacctgctacgccacgggccaaaagacgacatcgttgtgctgctgatgtgcatgtcgctgaccgtgctgttcgatatggtcatcgccattagcgtcggtatcgtgctggcttcgctgctgtttatgcgccgcatcgcgcgcatgacgcgactggcgccggtcaacgttgaagtgccggacgatgtactggtgctacgggtgatcggcccgctgttcttcgccgcggcggaaggattgttcaccgatttggaaagccggattgcaggcaagcgcgtggtggtgctgaagtgggatgcggtgccggtgctggacgccggcggtcttgacgctttcttgcgctttgtgaagcgcctgccggaaggctgcgagctgcgggtgtctaaccttgagttccagccgctgcgtactttagcgcgcgcaggggtccagccgattccgggacgcctgagcttctacccggaccgtaccgcggcgctggcggatattgaattaacgcaataaaagagaggctcgccggaagggagatccggcgagctgaattcagttagctgtgacgatgctggtcgcgacggcagcgtttatcgtagtggcgtacccaccaatagcggtcggagactctttcatgaccgccaacgcgagcgcccgccagccacaaaacggcgccgacgaaaatactcaacaccgcgccatgagcaaagaattgcggcaggttaaattgtggaagctggtttaaaatagagtaaccaacgccgaccaccatcacaaccaaccctaaacccatcagtatgttaccgagtaacgaagcgtttctgcgtttcatatgtcacctccggaccttgggctacatgggaatatccccaaaatttataggttaagtatagacaatagggatatgagtgattgcgtgagtgatcacattcgggaacatctgatcaacaaaagtttacaaataagccactgaacaacatcaaattctaatggttcaaagtggaaattatcagcaacggtagcgtttcgctggcagaattttgtcaagcgccgacgcaggcagtacactacgcggcaaagtacgcctatgcaggaataaaaagtgacgataaaactgattgtcggcctggctaaccccggagcggaatacgcggcaacgcgccataacgccggcgcctggtacgtagatttactggcggagcgccaccgcgcgccgctgcgagaagagagcaaattcttcggctatacctcgcgcctcaacctggcgggggaagacgtgcgcctgctggtgccgaccacctttatgaatctcagcggcaaagcggtggccgcgatggctaccttttaccgtattaatccggatgaaattctggtcgcccacgacgagctcgatttaccccccggcgtcgctaaattcaaacttggcggcggacacggcggtcataatggcctgaaggacattatcagcaagctgggtaataacccaaactttcaccgcttacgcgtcggaattggccatccgggcgataaaaataaagttgtcggctttgtgctgggtaaaccaccggccagcgaacagaagctaattgacgaagcggttgatgaagcggcgcgctgtaccgagatgtggctgaaagacggtttaaccaaagcaaccaaccgtttacacgcctttaaagcgcaataagcgtccgacgtgcggaatttttgccgcacaccgtgtataataggcgaagctatttacttttctacagtctgttattcataacagactgattatccaaagattaaggtgatttaaatcatgggattcaaatgcggtatcgtcggtttgcccaacgtcggcaaatccaccctgttcaatgcgctcaccaaagcaggtattgaagcggccaacttcccgttctgtaccattgagccgaacaccggtgtcgtaccgatgcccgatccgcgtctggacaaactggctgagatcgtcaagccgcagcgtatcctgccgacgaccatggaattcgttgatattgccggtctggttaaaggcgcgtccaaaggcgaaggtctgggtaaccagttcctgaccaatattcgtgaaaccgaagccatcggccacgtagtgcgttgctttgaaaatgacaacattatccacgtcgcgggtaaagttgatccggcggaagatattgacgtaattaacaccgagctggcgctgtctgacctcgatacctgcgaacgcgctatccaccgcgtgtccaagaaagccaaaggcggcgataaagacgctaagattgagctggccgcgctggaaaaatgcctgccgcagctggaaaaagcgggcatgctgcgcgcgctggatctgagcaaagaagagaaagacgccatccgctatctgagcttcctgaccctgaagccaaccatgtatatcgccaacgttaacgaagacggttttgaaaataacccgtatctcgaccaggttcgcgctatcgctgagcaagaaggttccgtagtggttccggtttgcgctgccgttgaatccgacattgccgagctggacgacgaagagcgtgacgagttcatggccgagttgggccttgaagagccgggcctgaaccgtgtaatccgcgcaggctacgctctgttgaacctgcagacctacttcaccgctggcgtcaaagaagttcgcgcatggaccattccggttggcgctaccgcgccgcaggctgccggtaaaatccacaccgacttcgaaaaaggctttatccgcgcccagaccatcgcctatgaagatttcattgcttataaaggtgaacaaggcgcgaaagaagccggtaaaatgcgtgcggaagggaaagactacatcgttaaagatggcgacgtaatgaacttcttgttcaacgtctaatcccggacgataaaatccgcgccccggcgcggatttttcatttcaaagcctcgcaggttttatgactcgcgaggctttaaattatctgaatggcgcatctaacggaatttctgcgtcaggctcgtgggtaattcggttacgcagatcgcgacgaatcatttcaattgcccagaaccaaaaaatatggccaagcagttcagaaatatattcatcagccggaatgtttaataacgacggcgtaagtcctaatagcggaaatgaaatccagtgtaccgcaatggtggcgacaatcccggcccatactccctgccataatttaacttttgggaatatctccgccaccacgcaatagccaatcgcgaacaccagcgaaaagatgatatgcgtgaccattaccggattgatgatatgctcagagaaggtgtacacggtatgtgtagggtcaatgccaagatagtcgcgtaaaaagagataaggaggattaaattcatcacgcccaccggaaaatgttcgcggcggcagaggtacttccgccccccacttaacgaatgccgacataattccggcaataaccccaactaataatgcgacgccatagcgacgccgacctggtgcagtttgtacaaaaaagtccttaattgccataaatccctcgccatgaataatattgttacagcattgcaatattctttaagtccgcgcgggtatggcttgatcaagatcacactttttgttcaaaagataaacaaagctaatatttttatgtcatcgcggagcatcaattaatgccccgcgtggcattcttttaatcacgccaccccattgccggtgcaacgtgcttcagaatagactcaatcacgtgagcgttataatccacgcccagctgattcggcaccgtcagcaataaagtatccgcttctgcgatcgcctcatcctgtttcagttgctcaatgagcttatcgggttcagcggcatagctgcggccgaaaatggcgcgggttttctcatcaagaaaaccaatactgtcgctgttatcccggctggagccaaaatacatccggtcgcgatcgtccatcagggcaaaaatactccgactgaccgatacccgcggcgtacgcgtgtgccccgcctccgtccaggcctgacgataagcgcggatctgtttcgcctgttgaatatgaaatggttcgcccgtctcatcatctttcagcgtcgagctctgcaggttcataccgagcttcgccgcccacatcgccgtggcattagagcccgcgccccaccagatacgctcgcgtagtccggcggaatacggctcaagacgcagcaatcccggcgggttggggaacatcggttgcgggttaggtttagcgaaaccttcgccgcgcagcacgtccaacaggacctcagtgtggcgccgcgccatatcagcgtcggactcgccatcctgcggttgaaaaccgaaatgacgccagccatcaatcacctgttccggcgagccccggctgatgccaagctgtaaacgcccaccggctatcaaatctgcagcgccggcatcctccgccatatatagcgggttttcgtagcgcatatcgataacgccggtgccaatctcaatctttttagttttcgcgccgatagcggccagcagcgggaacggtgaactgagctggcgggcgaaatggtgcacccgaaaataggcgccgtccgcgcctaactcttcggcggcaacggccagatcgatggattgtaaaagcgtgtcggcagcggaacgagtcgccgactgcggcgatggcgtccagtggccaaatgacaaaaatccaatctttttcatgaggatagaccctgatttggcaaaacattcagcagacgcggagataatattccgcgtctgtttgtggttcccctactctaccccttagccaaaatgtataaatggcgtttatttaacagaatggttcaaataaattgaccaaatataacgatggctatttctgcatcagcgcaaaaacgccccaaccgaaatattcccgggtataagtgacgtggcgaagcggtgcggcattgagctccgcacggacctcagccgcaaattcatcgtcgggattcgcctgcagccaacggcgcatcgtcagccatttagcggcttcataacggtcccacccttcgcggtcagccagcaccatctcaacaatgtcatagcccagttcgccaaaagtggcgaccagcgctggaagcggcaacaaatcggccaccgcagaaacgccgcaggcgcgcgcttgttcttctgtggcgggtaccttacgccaccagggttccccgataagtagcataccgccaggcttaaggctgcgggctaactgcgccacggttccagcgacgccgccggcaatccacgtcgcgccgatacaggccgctacatcgtattgccgttcggcaacgtaacctgccgcatcgctatggagaaaagtgacgcgatcgctaacgccaagcgctgcggcgcgttgtttagcctgcgcggtaaacaatgggctcatatcaatgcccagaccgccgatagcatggtcccgcgcccaggtgcagagcatttcaccagaaccgctgccaaggtcgaggatctgcgcccccgcctgcaggcgaagtacgcggccaagcgtggcatatttttccgccgtgaaggggttatggatacgatgttcactttcgctgatggtaaagatacgtgggatatcgatagttgtggtcatgtcactctccttagcggttatccggctgggcgcgaacgttattcagcccgctggtgttgatgcggtatggttggccgttaacggatttaatcagttttttagtgcggagctttttgaaaacggcgagcgtacagtcgctgagcagtaggccttcgcggctatagcactccacggcgatgacgcggcctgaggtatcgcgaatgtgcgaaatacgtccgcctttcgcgagaacgtgtaaggtacgttgttcctgacgggataaattcatactggaaaacctgtttaatcatcatgtgcaaaacgtgcaaacacgcagcggtgtccgcattcgatttcagcgcagtgataaccagcccggcctgaaaggtcggcaaactgattatcagatgattacattctccagcatcaaagcctcggtagagttgaaaggtatttaccggcttgatgataacatccagtgacagaaaggatatttataaacgggaaaattgtgatcggtatctgaaattgcgcccccgccccatgacgaaaggcgcacaatgaatggcagcaacgcattgctcctgattaccacatcaaatcatcaggtactttaaagtcagcgtacggatcgtcttcgtcctctgcttcctggctcagggcgctgttcaacacaatactctcggcgtcgcgctgggcgattttatccgccacgctggcaggaataatcgcgtattcatatttaccgttattatcaacagcaaggcgggcaatcgccagacggccgctaatgagctgcgcctgggtggttttatccacatcaatgtttttgatgagattattatccgtaaagttaaaagcgatatggcctttcgcaatcgtgattcggttcatttcgatcagctgcttaacctgcgctttatactcttttgctaaagccgcttgcttttgctgctcgctgagctgcttgtcgcgctcaagctgggcttttttgttttcctcaacggcctcgcgggcttcacgcgcctgaacacgtgactttttcgccgttctctgaaccttagccatctttttactggtgaccagacccgctttcagcatctgctcttgtaaggtaagttttgtcatcgtcgtttctacaatcgtttgaattatgattcggatacggaaaatcagggtcagactttaaggagcttcaccgtggcgtcgatgtcgatttcatcttcagagaagatgagcgtggtgccctgaaaggtagtgatcgccagctttttcagcgtacgcatttcacccggcttcacgctcgctttgggcttgatgctgttcatcagcagccccacggagagcaccgcattttccttgtcgatacgcgtatctgctggcacttcctcactgtagaccaggtaagacttaatcgatgtcagcttcaggcgctcaccggcaatatacagatgtttgctttccgggatgaccttcaccgcgtaagccgataggcctttattattggtcgtaggttcaaacgtgaccgccgcatctttcttaatcagctccggattggcgaccttaatcacgtgaaaatagcggttatcaccattgtcatctttgataaatccgaaacctttatctttaaaccacgttgtgatcgtaccgttcatcgccattaccgcctgattaatcgtttatctactcaattttgcagcgcgcagtttaaagcacaatgccagcgtagaccatgcctttgctctaagtgttacccgatatcggcaattgatcctggcttttgccgaaaatttgattcattaatgagttcggttcattcaggagaatgcatgatgcctaatctaccctccattgcgttgctaggtcctggcgctatcggcacgaccatcgccgccgtactgcatgaagcgggccgcaaaccgctgctctgcgggcgcaccgcgcatcagcggttgattttacgccacgaagacggcgaaacgatcattccagggccggtattgaccgatccgcatacgcttgaacgcccggttaagctgctgtttgtggcggtgaaaaccacccaggtagcggattgcgcgggctggcttaacgcgctgtgcgatgaaaacacggtggtctgcgcactacagaacggtgtcgaacaggaaagcctgcttaacccttatgttaacggcgcaaaggtattgccttcggtcgtctggtttccggcacaacgggaggcggatgcttcggtatggttacgcgccaaaccgcgtctgacgctacccgatacgccgcaagggaagaagatagccgaggttctcgacggtacccgctgcgcggttaagttgacggcagatttcgcatcagtcgcctggcggaaactgctgcaaaatgccgtcgctggcctgatggtgctggcgaatcgccgcgccgggatgttttcgcgccaggacatcaccgggctggcgctggcctatctacacgaatgtctcgcggtggcccgcgcagcaggggcggtactcgccgatagcgtgccgcaggaaattgttgatgggtttcatcaggcgccggcggatttaagcacctcgatacttgccgaccgtcaggccaatcgtccgctggaatgggacattcgcaacggagttgtacagcgctatggccgaacgctgggcgttgccacccccatcagcgatgtcgtcgtgccgctgctggcggccgcaagcgaggggcctggctaagattgcttcaaaaaaattaccgtatttgttatagtgttactcactgattatttatctctgcggtgccaaaaagaacaagattcaccgcaacccaggacaagaaaatgttagattaccgcttcccgacagctttgcagatggttctcagcgtagcgatggcggagcaattgggtgaacgttcgacgagtgcggttctggcctacggcctggaagccaatccgagctttatccgtaaactcatggttccgctcacccgcgacggcatcatcgtctccacgcttggccgcaacggctctattcatcttggccgccctgccgaccaaatcacgctgcgtgatatctatctttccgttattgaagataaaaaactgtgggcgtcccgccctgatgtcccggctcgctgcgtgatcagcgccaacgcctgctggtactttaagtccgtagccgatgaagccgagcaggcgtcgctcgcggtgttagctcgccataccgtggcaagcgccctggaagaggtcaaaaaagccgataccagcggctgcgatccgctgcctgagctgactgcacgctataaagaagcgcattaacttttcttgttgcgaaaaaaaaccgccttaaacgaaaaggcggttttttgttattagcagcgacctactcaggcaggacgtccctaaccggttcgccgcgcgtcaccagttttcgcagcgtcacgtaaaacaccggcgtcaggaacagcccaaacagcgtcacgccgagcataccggagaacaccgtgatcccggtgacgccgcgcacttccgcccccgcgccatggccaagaatcagcggaatcgtcccggcaataaaggcaatcgaggtcatgataatcggacgtaaacgcagacgacaggcttccagcgccgcttccataatccctttgccctgaatttccagttcgcgggcaaactcgacaatcagaatcgcgtttttacacgccaaccccatcagcaccaccagccctacctgcacaaatacgttattgtcgccgccggtcagccagacgccaaacagcgcggagagcatggtcatcgggacgataaggatcaccgccagcggtagcgtccagctttcatatagcgccgccagcaccaggaatgccaacaataccgcgaccgggaagacgatcagcgccgtattgccctgcgtagcctgctggaagctgagatccgtccactcaatattcatcccattcggcagtatttgcttagacatgcctgccagctgcgtcatcgcctgcgtggacgagagcacgcggggatcggcatcgccaatcaaatccgccgccggataaccattgtagcgaatcaccggatccggtccgtaggtggtattaatattcaccatactgccaatcggcaccatttcgccctgattattgcgggtgcgtaaattagcaatatcttccacgctgtcgcggaacggcccgtcagcctgcgccattacgcgccaggtacgcccaaactggttaaagtcattcacatacgatgaccccagataagtttgcagcgtcccgaaaaggtcggtcaacgacacgccctgcgctttcgctttatctcgatcgacctgcacatccagctgcggcacgttcgcctgataggtcgatatcgggaaatgcatccccggcgtctgcataatcgaacccgacatcgcgttcaccgcgttttgcaacgcgccataacccagaccggcgcgatcctgaatatacagtgaatagccggaaccctgacccagccctaaaatcggcggcggcagaatcgagaaaccaaagccctgctgaatttgcgcgattttggcattaatctcggcattaatttccgctgcggtgtgttttcgctgatcgaacggtttcagaccaaaaaagaccgtcccggtgttcggcgtattggtgaactgcagcgcattaagccccggaaaagccaccgcataatccacgccttcggtattcataccgatttcgctcattttgcggatcacggcgtcggtgcgcgccagtgaagagccttcgggcattttcacgccgccaattaaatacagtttatcctgcgtcggaataaacccgccgggtacgactttaaacatcacgccagcggcgcagagtagcaggacgtagaccacaaacaccgcgccgcgtcgcccgagcgttttgcctaccagcccctgatagccgtttgagctacgatggaaaaaacggttaaacggacggaaaatccagccgaacaagcgatcgataagccgggtcgggaagtctttcgccgcgccgtgcggttttaacagcagcgcagccagcgctggcgagagcgtcagggagttgatggcggagatcaccgtcgatatcgcaatcgtcaccgcaaactgcttataaaactgccccgttaccccggagaggaacgccatcggcacaaacaccgcgcacaacaccagcgcgatagcgataatcggcccggagacttcgcgcatcgcctgatgcgccgccgctagtggcgccagcccctcttcgatgtttcgttcgacgttttccaccaccacgatggcatcatccacgacgataccgatcgccagtaccagcccgaacagactcagggtattcagcgaaaagcccagcagataaagaatgctgaaggtacccaccaccgataccggcaccgcgataagcggaataatcgacgcacgccacgtctgcaggaacaaaatcaccaccagcaccaccaacactaccgcttccagcagcgtttgcaccaccgcgcgaatcgaatcgcgcacaaacactgtcggatcgtacggcgccgcccatttcatatcttccgggaaacgggtggagagttcgttcattttcgcgcgtacggcgttagacaaatcgatagcattcgcccccggcgactggaaaataccaatcccgaccgcgtctttattgttaagctgggaacgtaacgcatagctacccgagcccatttcgatacgcgccacgtcgcgcaggcgcaccagcgaaccgtcttgcgccgttttcagaataatattgccaaactcttcttccgtatgcagacgcccctgggcgttaatagagatcaaaaaatcgctctctttcggcagcggctcggcgcccagctgtccggcggaaacctgaacgttttgctcctgcatcgcagtcaccacatccgatgcggttaacccgcgcgccgcaaccttattgggatccagccagatgcgcatcgcatattcacccgagccaaaaatctggatctgtccgacgccgggcaaacgcgcgagttcatctttgactttcaacgtggcgtagttacgcatatacagtgaatcgtacttaccgctgggtgaaaacagatgcaccaccaacgtcagcgttggcgattgcttctgggtggtgatgcctaaacggcggacatcttccgggagacgcgcctcggcctgcgagacccggttttgcacctgaacctgcgcctgatcggggtcggttcccggacggaaagtgacggtagtaaccaatacgccgtcagagcctgcgacggacttcatgtacatcatattttcgacgccgttgatggcttcttccaatggcgtcgccacggtttcggcgatcactttcgggttggcgccgggatattccgcccgcacctgcacgctaggcggtacgacatcaggatattcgctgaccggcaacagcggaatggcgatcaagccggtgataaaaatcagaatcgacagcacggcggcaaaaatcggcctgtcgataaaaaagcgggaaaagtccatatggcggattctcagataagggatcagttgagggcggcgctggtggtcatggcaacggtcttcgcgttaaccggcattcccggcataaacactttttgcaaaccatcgacgatgactttatccccagggttcagcccctgcttgacgatacgtaaaccggcagccaaccgccccggcgcaatatcgcgacgctgggctttaccctctttatcaacgatatagacatatttacggtcctgatcggtcagtaccgctttgtcgtcgataagcgtggctttgaattcagcgctacccggcaagcggacacgggcaaagagtcccggcgtgaacagacgctgcgaattgtccagcagcgcgcgcatgcggatcgtaccggtgctcggcgttaactgattatccagaaaatccactttgccctgatgagggtagccctcttcgcccacaaggccgatctcaaccggtaatgcctggtggctgctggaggccccctgccccctgcgggcaagattttggtagtgaagataggtcgactcatccacgtcaaagtagacataaaccgttttctgcgacaccagcgtggtaagaacgctggcggtatcaccagcggtgaccagattaccgctggtgattaacgcgcggctggcacggccatcaataggcgcggtcactttggtgaagtccagattaagctgcgcggcatcaaccgccgcctgggcggcgcgaatatccgcttgcgcctggaccgctgcggagcggcgctgctcccactcttcacgggaaaccagattggtattgattaatttatcggtacggtttgcttcactgcgcgccaggctggcttgcgttttcgctcttgccagggttgcctgcgcctgttccagcgccgcgcgataggttcgatcgtcaatggtgaataacacctcccccttcttcacctcctgaccgtcggtgtaattcactttatcaatataaccagaaacgcggggacgtagctgcacgctttccaccgcctcaatccggccattaaagctatcccactgactaatggatttcactaccacctcagcggcgctgacggcaggcgcttgcggcgcggcgttttgcgcgacgccttcatcgcagccggcgagcagggccgagagtagcaccatacctactgcagtcagatgacgttttccccaggttttttgcaggctcattatttttattccggtaattgtcgccgccgggcaagacgctgcgggagacgctgcgccacttcctttgtccgggcaggcttgaggccatttgtgtcgttcatcgccacaaaactgtaacagttgcgaatacactatcgcggcgattgtaggaaggcgctaaactaagtgcaagaataattgttgcactttatgtgctattcttctggatcgaaaaaagcccatttcaggcagggaattaattgcaacaataaaacttgcaattaatgctaaaacgggccaccttaaatgcaacaattaaagatgcttttattatctgcgtggagcaacaagatgaacactgctgcggttattcacgatctactcgattggatcgacaacaatctcgagagccgtctggatattgagaccgttgccaggcgtgcgggctattcgaaatggcacctgcagcggatcttcaaggagcacaccggttaccctctcgctgaatatattcgcatgcataagctacaaagatcggtcgaacgcttagccaacagcgacgagcctattttaaacgtggcgatcgcactgggtttcgactcccagcaatcctttaaccgcagcttcaagcgccagtatggtcaggcgcccggcgcctggcgacgcagtatctgcggcgcagaaacacagcatttacgctaacagtcgtgataaccgtcgtgataatcgtcctcagggaatcggcgagcgaacagtagaagcacctatgtttagcagctatcagggcgtagcgcctaccgttatgattggcccataccaaacaaacaaggacgcgttaccatgctgaacaaatcgccgttggtgttgttattgttccctttactgctggcaggttgtcaccatcatcagcccacgccgcgcgcggcggcgagcgccactgaagtagacgatctgttcgccagcctcccttcgtcgaaaccatcaagtcgggctacctacgcccgacagataatgaccgccatcagggcaaaaatgcctgattccgtggagtatcccgggcaaacctgtcggattcgtttgtcgctgcagcgtgatggcaccgtaaattccgctaccgtggaaaagggggatgaagaactatgcaacactgttgtagccgcatttatgcaagcagacattcccgccgcgccggatgatgacgcttatcagacatttaaaaataccagtatcgattttaaagcataagactagcgctttattaccagcagcatggcattcaaccgaccgtaattcgtagtatattaaaaacaatctctgttatcaggtatacggaatgtcctactccatcggcgaattttcccgtctttgcggcatcaatgcgaccacgctgcgggcctggcaacgccggtacggcctgctgaaacccgagcgtaccgatggaggccaccgcctctataacgatgatgatgtccaactggcgctaaaaattctcgactgggtaaaaaaaggcgtgcctgtaagccaggttaaaccgctattgacccgctctgacgccggccctggtgataactggcttgtcctgcaggacaatatgctgcagcggctgaaagagggaaaaatcgaatccctgcgccagctgatctacgatgccggtcgggaaaatccccgccctgagctggttaccaacgtattgcgcccattacgcagtaaagtatcggctaatgtgccggcgatgcagaccctgcgtgagatcctcgacggcatcattatctcctacacctctttttgtcttgaaggcgataaacgcgcgccgggcgataactctctgattaccggctggcacctgagcgacccatgtgaaatctggctggaagcgctcatgcgtaccggacaaggtcatcgcattgatgtgctgccgatgccggccaccgcgctggccccggaaatatttcctcaacgccactggttgctggtgaccacgggccagctcaccgccgcacgccagagacagatagatctctggcgtcaattggttatttctctggacgttatctccttgtaaaaaagctttgctcccctacgccatgttctccgctaaaaaagcacgccaaaaacttggacaaaaatacgtgattgtgtaagtttaatgtatcgggctaaacgtttttgcgcgatggcccatccagtgagaacaaagcgaggagtacgccatgaataagcaacctgtcattggcatcagcggctgtttaaccggctcgtccgtgcgctttgatggcggacataaacgattgccatttgcgatggatgaactggcgccgtgggtaaccttcaaacccatttgtccggaaatggccatcggtctcagctctcctcgtccggctctgcgcctggtgcggaccgacgaaggtgagattcagatgcgttttagcagcgagccgcacgacgatgtcacgggcaaaatggcggactttaccgccggttacctgcctgggcttggcgaattagcaggttttatcgtctgcgccaaatcaccgagctgcggcatggaacgcgtgcgcctgtatgatgaaaaaggcaaccgcgggcgcaaagaaggaaccggcctgtttacccacgcgttgatggaagcctatccgtggttgccggtagaagaggatggacgactgcacgacccgcagttaagagagaattttgtcgagcgtcttttcgccctgcatgaactgaatacgctgcgggccaatggcctgacccgtcgggcgttaatggattttcatagccgctataaactgcagctactggcgcatcatcaggccggctatcgcgaaattggccctttcgtcgcgtcgatgcatcaatggcaagacctggatgcctttttcgtcgcctaccgcgataagctgatggcgatcctgaaaaacaccgcctccaggaaaaaccacaccaatgtgctgatgcatattcagggctatttccgcgaacggttgaatagccgccagcgcggcgagctgcgtgacgtgatactgcattatcgcgcggggctgctcccaatcctggcgccccttacgctgcttaagcattacctggccgagtatcctgatcgctatctgcagacgcaaaactattttgatccctacccgcaggctttagccctgcgcctgggtgttaattaaccgccaggcggtgtgcaattacgacgaagcgtgactacttcttcttgttcatcatggcttttaaatcggcaaaaggattgtaggtggcttcaccgacatccttttgcgcatcttcaccggccaccactctggtaccgtactggtcggcctcagtgtacttggagtgctcatgatcgtggcaatagaggcacaatagctcccagttgctgccatcttccgggttattggtatgatcgtgatcgatgtgatgtaccgtcagttcacgcaggttggagtagacaaattcgcgcgagcagcgtccgcatacccatggataaattttaagcgccttctcgcgatagccactttccaggcgggcgtagtttttggggatcaaagccatggcagatgttacctgtgataaagagagaatttacgataataacgccaatatagcgtaaaacggagcaggaaaggaaatcgatgcgctgaggtgggcgggggcatcttcccggcgtggcgccgggaagatgattattaatggctggtcactgccgccgccgcgaccggatgatccgctgaagcgacaaccgtggtacgcgccacaggatggcgaccgttatcgctggttgccgccgccaccgccaccggatggtccgctgtggcgacagccgtagtacgcgccaccggatggttgccgttatcgctggttgccgccgcgaccgccaccggatgatcggctgaggctacagctgcggtccttgcgaccggatggtaacccgcgaaggcagaaatacttgctgatgctaataccagggtcagaataatctttttcataatatcacctctaataataataacctgaaaaaaccaggcaaaatatggcaataaatacagccaatggatgatttaccgtagcaagcggcagcgggcatgaatagctcactgttatttaattatggataacccggtacacacagagctaacggctacttgcaacgagtaaaaatcaccatctgagcaggtgacttttgagaatgcctctggtaaggaaggctattgtcatcttccgcttattacactagcatttccatccgctgtgcatgcgtttgttcagtttttcctgataccgcacatatcatctgatgatctcttcattaccccttccgtatcgacaaagtggccacttgactaaaaacgatttctccgtagcttcttccatgtgtgagggaaacgattctagagtctgatggcgctacgccctttcaggtgctccattaaggactttatcgagattttgggcaggacaatcactatctccccaggaggtggtttaggggcgacaataaaacgggaaccttagattaccgttttgcattaatccagaaaattggattacatattcttgctgatcgcgtcgccgagttcagagcatttcaacagtttcacgccctccataccttcaacgttcaggtctgcggcatcggaccactgcatgtgacgtagcatcattgctttacggaaatattaagattttgatttatattaaaacatttaattttcatacaatatgatatgcttttccttttagttatatagcccagaattggccagagcagcattcagttttgataaccaccactactttaaccagaaaccagacattaactcatgaacaagttttgctctgtcatccgataataatcccagtgagaatgcgaacaaatgagcactctcttcatttcgttcgtaaccatatgccaaaagaaaatcacaatagagttttcttctgtcagctcgctcttgagactgctgcgcgagttttaactgacgatcaagtttatttctggccattgcattacctttataaataaaaacagaagtatacgccgatagttctattcgaattgtcacaaaagatgctttaataatatgagaatagctgcgagttcaacttccgccagtccaccaatcatgattggatagttgacttgcttccctttgataaatacacaccgaagttagtaatgtcttcataagccacatgagaacatccccatgaataagcgtttttctgacgaacagctcatcagtattctccgcggggatgaagccgaagtttctgcccgtgagctctgccataagcacgccatttccgacaccacttttacacctggcgcaagaagtatggaggtatggagatgcacgaggttaaacgcctggagtcgtttgaggaagagaacgccagacccaagaagctgcttgccgaagccatgcttgataaggagtcacttcaggtggctctggggcgaaaagtactgacgacagaccacaagcgggaagccgttaagtttagttgtgaagcgaccgatctgtcacaacgtgtgcctgcaggcttacagatttacctctatcgacctgacgctacgaggctcagcgtcctgcggctgatgcgcatttatcagggggcatcaccaaactaccactggagcgcaagcattttagctaccgccgcatcgcgccgtgaaggtcttcacgttaatcacaagcgcgtgtagcgcctttatcatcccagtaggctgggcgtaaaaaacgtagacggcatcataaatgcctggcaacggagcgtctgccgctgctccgcccggcggtacccaccccgactaggtcaatggatttcgtcatggacgcgctgaccaccagtgcctgaccagtgtgaacgacttcacgaagaagtgtctgacaattatcaccgcattcgggatttcaggcgttaaggtcacacgtactcgggacagtattgcacagtttcgaggctctccggcgacgataagaacagtcctgggaccggagttcacttgcagcacaatggatcaatgggcctatgagcatagtgctgagttacggttaatccagccgggtaaaccaatgcagaacagatttattgagagctttaatggacgatttcgcgatgaatgtctaaatgagcactagttcagccatagtgttgatgtcaggaaaatcattaacgagtgtcggccacattcggaactgaagtatcagacgccatcagagtttgcagcacggtggcgaaatggaaaatgtgaaggtaaacaaaccgacattaccaactgacagttgtaatagttggcttccgaaatagcggcctcacggcacacatccttgacggtacgtccggcttcaacagacttcagaacggcgataatctggtgttcagtgtatcgggctttacgcatcgcgatctcctcaggggacataatcagtatgtcggaagatctctaaaagtgaatgggtcgttttgcccggatacttacatccccaacacacagctaaataccatgatgatagaggaaacgaattgataaaaagaataataattaattttaaaaatcatgatatttggggtgatactttaatgcatcatagttttcaccccatgcctttttatcatagaatgcaacatgttttttatttataagtttctctgctggtaaattatctagaattgcatatgagttcatatatgtttcaaatttcctaccatggacaaaattggcattataaaaaagcattagtaattcataattagaaagttgagcgcgtaaaatatttgcatattttttcttattaacactagtcaaatcagattcatggattattttgaacatattataaatatacctataataatgagaaagattttgagctctgtttctaaaataaaacctatactcattagacatccgtaaggatgcttttttaacttcaatttcatcacttaattcaaaatctaataatattccatatttttgtctaatttcctttttgaatcttctaaaaaaataaaggaaaacatgacgaccttctgccaaagtctttcctgaggagttttcaaccctcatatctttaattaacgtttgcaagatattcaacatattaaagaaggagttttcgaaatccctaattttttctgcttcctctcttttcctagaatcatcttctattatttttgtagcatccatctggagttttatcgtccataaaactccacaaaaacccatagcagaaaagatcgaggtaaaagctccccaagaatcgccaaatactcctctctggttcgcatccatgccttcaaagggccaaacatcatgcgatatagcataaccatagccgattccaaaaattgcactgatcagcattaaaagacgaatcatttcctaagctctccttgttcgttttattagactgttttgatttaattttgacaactattcgaaaaccagtaataaaaacgggaaccaattggctcccgtttttaagtatccattaatgcatattacatgtttttgatgatcgcgtcgccgaactcagagcatttcagcagcttagcgccttccatcagacgttcgaagtcataggtcacggtcttggcggcgatggcgccttccatgcctttaacaatcaggtctgcggcttcgaaccactgcatgtgacgcagcatcatttctgcagacaggatgatggaacctgggttcactttatcctggccggcatacttcggcgcggtaccgtgggtggcttcgaacagcgcgcactcgtcgccaatgttggcgcccggcgcgataccgataccgccaacctgcgccgcaagggcgtcagagatatagtcgccgttcaggttcatacaggcgataacatcgtattcagccggacgcagcaggatttgctgcaggaacgcatcggcgatcacgtctttaaccacgatctctttgccggtcttcgggttcttgattttcacccacgggccgccgtcgatcagctcaccgccgaactcttcgcgagccagctggtaaccccagtctttgaacgcgccttcggtgaacttcatgatgttgcctttgtgcaccagggtcacggaatcacgatcgttagtgatcgcatattcgatagcggcgcgtaccaggcgtttggtcccttcttcagagcacggcttgatgccgataccgcaatgttccgggaagcgaattttcttcacacccatctcatcgcgcaggaatttgataactttgtcagcttcggcagagtctgctttccactcgatacccgcataaatatcttcggagttttcacggaagataaccatatcggtcagctccgggtgtttaaccgggctcggggtgccctgatagtaacgtaccggacgcaggcaaacgtagagatccagctcctgacgcagcgccacgttcagagaacggatgccgccgccaactggcgtcgtcagaggacctttaatagcaacacggtaatcacgaatcagatcgagggtttcagcaggcagccagacatcctggccgtaaacgtgggtagatttttcaccggtgtaaacttccatccaggaaattttacgctcgcctttataggctttctcaacggcggcatcaaccactttcagcatcgctggggtaacgtcaacaccgataccgtcgccttcaatgaacgggataatcgggttatgagggacgttcagtttgccgttttgcagggtgattttctgaccttccgccggaactactactttgctttccattaacctctccttcgagcgcttctggttctgctcttccctcttcacgcgagcctggtattggcttagtcggcctactcctgagtaccgggttgccccgctaaccggagattcgcgtccgtgttgccttcctgcctgtattgcgaatcggtttgagcaattttttgttaataatttgtaatgagcatgtcaatactacctgaatgtttgcgtccatgaaaggcattcgtaattaggctataatgcggcaattgagagagcctgaaaataccatgcagaaaacttcatttagaaaacatcgcgttgagcgattcagcacacaacaagtgaccagacaacgtaaagaacgccagcttaaaactgtgatcttgttcaataaaccctacgatgtgttgccgcagtttaccgacgagtccgggcgtcgcacgctgaaggattttatccctgtcgccggcgtttacgctgccggtcgccttgaccgcgacagcgaaggtctgctggtgctgaccaacgacggcgcgctacaggcaaaactgacccagcccggcaagcgcaccggcaagatttatttcgttcaggtggaaggcgaacctacagaagaagcgatccgcgcgctgcgcgacggagtgacgctaaacgatggacccaccctacccgccggcgtggagctggtggatgaacccgcctggctttggccgcgcaatccgccgattcgcgagcgtaaatcgattcccactcgctggctaaaaatcaccctctatgagggacgcaaccgtcaggttcgccggatgaccgcccacgtcggttttccgacgctaaggctaattcgctacgccatgggcggctatacgcttgatggtttagccaacggcgagtggcgtcaaaccgaataaccgcattcataaggaagctcgatgtttaaaccgcacgtcaccgtcgcctgcgtggtacacgccaaaggcaaattcctgattgttgaagagacgattaacggcaaagcgctatggaaccagccagccggtcatcttgaggccaatgagaccctggcgcaggccgccgagcgcgaactgtgggaagagaccggtattcgcgccgcgccgcagcacttcatccgcatgcaccagtggcaggccccggataatacgccattcctgcgcttcctgtttgccattgagcttaacgatacgtgcgctactgaaccgcacgacagcgacatcgatcgctgtctgtggctcagcgctgaggaaattcttaacgctaaaaacctgcgctcgccgctggtggcggaaagcattcgcagctatcagcaggatccgcggcatccgctgtcgctgattgcggaatttaactggccgttcacagggggtgcctgaacggttgacgcgtgctagaatacgccgccttgaagttcaatgtggtgagtattccaatgtcagaaagtccaaaaaaagtgatcgtcggcatgtccggcggcgtcgattcctctgtttccgcctaccttctgcaacagcaagggtataaggtggaaggcctgttcatgaagaactgggaggaagacgacggtgaggaatactgcaccgccgctgccgacctcgccgacgcgcaagccgtctgcgataagctcggtattgaactgcataccgtcaactttgccgcagaatactgggataacgtcttcgagctgttcctcgaagagtataaagcaggccgtacgccgaacccggatatcctgtgcaacaaagagatcaaattcaaagccttccttgagttcgccgcagaagacctcggcgctgactacatcgccaccggtcactacgtgcgccgcgccgatgtcaacggcaaaagccaactgttgcgcgggctcgacggcaataaagaccagagctatttcctctacaccctcagccacgaacaaatcgcgcaaagtctgttcccggtcggtgagctggaaaaaccgcaggtgcgtaaaatcgccgaagagctggatcttatcaccgcgaagaaaaaagactctaccggcatctgctttatcggcgagcgtaagttccgcgacttcctgggccgctatctgcctgcgcagccgggcaaaatcatcaccgtcgacggcgatgagatcggcgaacaccaggggctgatgtatcacaccctcggccagcgtaaagggctcggcatcggcggcaccaaagaaggtagcgaagatccgtggtacgtggtcgataaagacgtggaaaacaacgtgctgatcgtcgcccagggtcacgatcacccgcgtctgatgtccgtcggcctgattgcccagcagttacactgggtcgatcgtcagccgctgcagggcacccttcgctgcacggtgaaaacccgctaccgccagaccgacatcccctgcaccgtgaaggcgctggatgacgaccgcatcgaggttatctttgatgaacccgtcgccgccgtgacgccgggacagtcggctgttttctatagcggcgaagtgtgtctcggcggcggaattatcgaacagcgtctgccgctggcgtcttgatcgaccattttccgccggatgcctgattaacgcccggcgggttacaaggagtaagcgtggcgaagaattattatgacatcactctggcgttggcgggcgtatgccaggcggcgcggctggttcagcaactggcgcatcaggggcattgcgacagcgacgccctgcacgtttcgctgaacagcatcatcgatctcgacccggattcaacgctggcggtattcggtgggagtgaagccaatcttcgtctcgggcttgagactctgctcggcgtgctgaataccagcagccgtcagggcctcaacgcggagctcacccgctacacattaagcctgatggtgctggaacgtaaactcgccgccagcaaaggggcgatggataccctcggcaaccgcatcggcggcctgcgccgtcagttagaacattttgatctacaatctgaaacgctgctcagcgcgatggccggcatttacgttgacgtcatcagcccactggggccgcgcattcaggtcacaggttcccctgccgtgctgcaaagcccgcaggttcaggcgaaagtccgttctaccctgctcgccggcattcgttccgccgtgctatggcatcaggttggcggcggacgtctgcagctcatgttttctcgcaatcgtctggttaaccaggcaaaacaaattcttgctcatttaaccccggagttatgatttatggaattatcctcactgaccgccgtttcccccgtagacggccgctacggcgataaagtcagcgcgctgcgcggtatcttcagcgaattcggtttgctgaaattccgtgtacaggtagaagtccgctggctgcaaaaactggccgcgcacgcagcgatcaaggaagttcctgcttttgctgccgacgcaaacggtttccttgataaaatcgttgccgacttcagcgtagaggacgcggagcgtatcaaaaccatcgaacgcaccaccaaccacgacgtgaaagcggtagaatatttcctcaaggaaaaagtcgccgatatcgccgagctgcacgcggtgtcagaattcattcacttcgcctgtacttctgaagacatcaacaacctgtcgcacgcgctgatgctgaaaaccgcacgtgacgaagtggtgctgccgtactggcgcaagctgattgacgcgattaaagatctggcgacccaataccgtgacgtgccgctgctttctcgtacccacggtcaaccggctaccccgtccaccatgggcaaagagatggccaacgtcgcctaccgtatggagcgccagtaccgtcagctgaatcaggtggaaatcctcggtaaaatcaacggcgcggtcggtaactacaacgcccacatcgctgcctatccggaagttgactggcaccagttcagtgaagagttcgttacttcgcttggcattcaatggaacccgtacaccacccagatcgagccgcacgactacattgccgaactgttcgattgcatggcgcgcttcaacaccatcctgatcgatttcgatcgcgatgtgtggggctacattgcgctcaaccacttcaaacagaaaaccatcgccggcgaaatcggctcttcgaccatgccgcataaagtgaacccgattgacttcgaaaactccgaaggcaacctcggcctggcgaacgccgtgatgcagcatctggccagcaaactgccggtttcccgctggcagcgcgacctgactgactccaccgtgctgcgtaacctcggcgtaggtatcggttatgcgctgatcgcgtaccaatccacgctgaaaggcgtgagcaaactggagctgaaccaggatcgtctgctggacgaactggaccacaactgggaagtgctggctgagccgatccagaccgtcatgcgccgctacggtatcgaaaaaccgtacgagaagctgaaagagctgacccgcggtaagcgcgttgatgccgaaggcatgcagcagttcatcgatggcctgccgctgccggaagcagaaaaaatccgcctgaaggcgatgaccccggctaactacatcggccgcgcgaccaccatggtcgacgagctgaagtaaccggcctgactcaggtagcatgggcaatctcttcgcgcatgctacctggcaatcccccgctttccacgcagaaaaacgcgctctcccgcctggtttaaataatgtttacccccagccccacataatggcgttaaactattaaaatcgaaaatgaaatggagaatgggcatgcgcgtactcgtcgttgaggataatgctctgctgcgccatcacctcaaggtccagctacaggaattggggcatcaggtggatgctgcggaagatgcaaaggaagcagactactacctgggcgagcacatcccggatgtcgccatcgttgacctcggcctaccggatgaagacggtctgtcgctaatccgccgctggcgcagtcacgacgtatcggtaccggtactggtgctgaccgcccgtgaaggctggcaggataaagttgaggtgctgagcgctggcgccgatgattacgtcaccaaacccttccatatcgaagaggtcgccgcccgcatgcaggcgttgctgcgtcgcaatagcggtctggcctcgcaggttatctcgatcccgccgttccaggtggatttatcgcgccgcgagttatcggtcaatgaacagccgatcaagctcaccgcctttgagtacaccatcatggaaacgctgatccgtaaccgcggcaaagtggtgagcaaagattcgctaatgctgcagctctacccggatgccgaactccgcgaaagccacaccatcgatgtgttgatggggcggctgcgtaagaaaatccaggcgcaatatccgcaggacgtgatcaccaccgtgcgcggccagggctacttattcgaactgcgcggatgaaaagcgtgttacgacatattcttccgctttctctgcgcgtccgctttctgctggcgaccgccgccgtggtactgatcctgtcgttggcgtacggcatggttgcgctggtaggctacagcgtgagctttgataaaaccaccttccgcctgctgcgcggcgagagcaacctgttctacatgctggcgaagtgggaaaataaccacatcgatgtcgatatccccgaacacctgaacatgcagagcccgacggtgacgctgatttacgacgccaaaggtaaactgctgtgggcgcagcatgacgtcccgtggctggtgaagcggatccaacctgaatggctgaaaagcaacggctttcatgaaatagaagccgatgttggcagcagtagtctgctgctgcgcaataatgatgaaatgcgcgaacagcttgacgccatccgcgaggaagacgactcctcggagatgacgcactcggtggcgattaatctctatccagccaccgcgacgatgccgcaattgagtattgtggtggtcgacaccattccggtggagctaaaacgctcttatatggtgtggagctggtttatttacgtgctggcggccaacctgttgctggtcattccgctgctgtggcttgccgcctggtggagtttacgccctatcgaatccctggcgaaagaggtccgcgagctggaagaacatcatcgcgagaggctcgattctcacaccactcgtgaacttaccggcctggtcagtaacctcaatcgcctgctgaaaagcgagcgtgaccgctatgacaaataccgaaccaccctcactgacttaacccacagcctgaaaacgccgctggcggtgctgcaaagtaccctgcgctcgttgcgcggcgagaaaatcagcgtcagcgaagctgagccggtaatgctggagcagattagccgcatctcgcagcaaatcggctactatctccaccgcgccagcatgcgcagcggcaatgcgcttctcagccgggaactgcaccccatcgccccgctgctggatagcctgacctctgctttaaataaggtctaccagcgtaaaggggtcaacatcacgctggatatttcgccggagataagctttgtcggcgagcagaacgactttatggaagtgatgggcaacgttctcgataacgcctgcaagtactgtctggagtttgtcgaagtctcggtacgccagaccaacgacaaccagttgcatattctggtggaggacgacggccccggtatcccccgcaaccaacgcacggcggtgttcgatcgcggccagcgcgccgatacgttgcgtccgggtcagggggtaggcctgtctgtcgcccgcgatatcgtcgaacagtacgacggcgatatcctgaccggcgacagcctgctcggcggcgcctgcatggaagttatctttggccgccagcttcctgatgataaagagagctaacgcaacagttttttaacggcgcctgcatcgccgcggcgccgcatccgttataatcccagacagacacctgctgtggaatataaatatggactatcaattaacgcttaactggcccgacttcatcgaacgctactggcaaaaacgcccggtagtgttaaagcgcggcttcgccaatttcatcgacccaatcagcccggatgaactggccggcctggccatggagagtgaggtcgacagccgcctggtgagccatcaggacggaaaatggcaggtcagccatggtccatttgaaagctacgatcatcttagcgagaacaactggtcgctgctggtgcaagcagtaaacaactggcacgagccgacggcggcattgatgcatcccttccgcgccctgccggactggcgtatcgatgacctgatgatctctttctccgttcccggcggcggcgtgggtccacaccttgatcaatacgacgtgtttattattcagggcaccgggcgccggcgctggcgcgtgggcgaaaaggtgccgatgaagcagcactgcccgcatcccgatctgctacaggttgatccattcgaggccatcatcgatgaagagatggaacctggcgatattctctacattccgccaggattcccacatgaaggctattctctggaaaattcgcttaactattcggtcggctatcgtgcgccgaatgcccgcgagctgttcagcggttttgctgactatattttgcaacgagagttgggcagccagcgctatgccgatccggacgtgccatcccgcgaccatccggccgatattctgccggttgaactggatcgcctgcgtgagatgatgctggggctgattaaccaacctgaacactttaagcagtggtttggcgagttcattacccaatcccgccacgagcttgacgtagcgccgccggagccgccataccagccggatgaaatttacgatgcgctgcagcagggcgataagctcgcccgccttggcggcctgcgcgtgctgcggatcgatggcgaagtgttcgttaacggcgagaaaatcgactctccgcatcgcccggcgcttgacgccctggcaacgcatctgtcgctacgcgccgaacatttcggcgatgcgctggaagacccatctttcctcgccatgctggcggcgctggtcaacagcggatactggttcttcgaggactgagtcgacaccctgcccggtggcgctacgcttgccgggcctacaaacggcatcaacccacaccctgcccggtgcgctgcgcttaccgggcctacaacggcatcaacaacaccctgcccggtggcgctacgcttaccgggcctacaaacgggcatcaacccacatcctgcccggtggcactgcgcttaccgggccgacaaacggcatcaacccataccccgcccggtggcgctacgcttactgggccgacaaatggcatcggtaccgtaggccggataaggcgtagccgccatccggcatattaccgccgctctccggcatctatttcgaccgtatccccagcccaatcttcaggatataaccctttcctcacatcgcggtggaacgttgaatatggccaatccctcacgcatccaacaagccgatatttcactggattgatataaacgtaatccatatggcgccgataatcttcatcattacggatggcatgttcccaaaaacgcggctgccagatctggttttgcgctaacgcacgcgtaaaagactttttaatttcccgccaacgaccagaataatcagaatcgccttccggcaacgtccagatacagtgaatatgttcaggtaacacaacccaactgttaatctggaaaggtcttttacgtttagcacaggctatcgcggcacgaagatgatcaatatgtcgtgtcagcagatcgctgtggcgattttgcaggtttacggtgaagaaccagcagccgccggggatataactacggcgataatttgacatcagaggttccctcctcttcagtttatatggactctttttgcccggtggcgctgcgcttaccgggcctacaggaccgggatctggctttaacgttttgccgtcagctccgcaatccgcacaatcacctgcacggctttctccatgccctccagagtgacaaactcgtgcttaccgtgatagttgtagccgccggtaaataggttcgggcacggtaagcccatgaaagagagctgggcgccgtccgtaccgccacggattggctttatctgcggctcgatatcgcagtccaccatcgcctgacgcgcgatgtccactacatgcggatgggcaatcaccttctcatgcatgttgtaataactatcttcgatcaccagttcgatgtagcaatccggatgtagccctttaccgacctttttggcgatctccatcattttgcgtttgcgcgcttcaaactgcttgcgatcgaaatcgcgcaaaatgtagtgcatctccgcccggtcgacgctgcccttgatgctggtcaggtgataaaaaccctcataaccgtcggtggtttccggggcctcactggccggcacttcggcgtgaatacgcgccgccagcgataaagcgttaaccatcacccctttcgccgtgccgggatgcacattattgccaacaattttgatggtcaccgaggcggcattgaaattttcaaactccagttcgccgaccccgccgccatccacggtgtacgcccagcgggcatcaaacgcggcgacgtcaaagtgcttcgcgcctttgccgacttcttcatccggcgtaaaggcaacgcgaatatcgccgtgagggatctttttcgcctgcagcgtcgccagcgccgtcatgatctctgcgatgcccgctttatcgtcggcgccgagcagcgttttaccatcggtggtaatcagggtctggcctaacagctgatgcaggaccgggaacatcaccggcgacaacacttcatcgccgatgccgagggcgatatcgccgccgcggtagttttcgacaatttgcggattcacgttcttgccgctgaaatccggcgaggtatcaacgtgggaaataaaaccgatggccgggatttcgcctgcgacgttggccggcagcgtccccatcaccgtgcccttttcacttagcgtcacgttgaccagccccatctcttccaactggctctgcagcaaacgcagcagcttccactgcccttcggtactgggaacctgacgcacgccaggcttcgattgcgtatctaaagaaacatactgcagaaaacgctcaagcaatttatccatgtggccaccctctttttttgtgacaacattatcaataagggcgaaaagacaaatattgcgtcaggtcatttttagcccgtaaaccaaaatttaatacattcacatgcattatgtgtaaaggtggtacaccgcggtacaacaatgattggcgattacaatcgtttgccgtaaaatgctggcccttattaattatgtgcaaccccaaaggtggttaatcacaaaccccgcagcgatcccttttccgttgcgtctacatgggacagagtcaaaaattgaatatacaaccgcgttcgctttctccgctggtacaactggcgggaattcgcaaaagctttgatggtaagaccgttatctccgatctcaacttaaccatcaataatggtgaatttctcaccctgcttggcccctctggctgcggtaaaacaaccgttcttcgtctaatcgctggtctggaaagcgtcgatgtcggacgtatccaccttgaagaccaggatatcacccatgttccggcggaaaaccgccacgtcaataccgtattccaaagctatgcgcttttcccgcacatgaccgtgtttgaaaacgtcgccttcggcctgcggatgcagaaaaccccggcggcagaaatcaccccgcgggtgatggacgctttgaaaatggtacagctggaggcgtttgcccagcgtaagccccaccaactctccggcggccagcagcagcgtgtcgccatcgcccgggcggtggtcaacaaaccgcgtctgctgctgcttgatgaatccctctcggcgctcgactacaagctgcgtaagcagatgcagaacgaactcaaagcgctacagcgcaagctcggcatcacttttgttttcgtcacccatgaccaggaagaagccctgacgatgtccgaccgcattgtggtgatgcgcgatggcaaaatcgagcaggacggcactccgcgtgaaatctacgaagagccgaagaatctgttcgtcgccagttttattggcgaaatcaacatcttcaacgcgaccgtcattgaacgtctggatgaacagcgcgtgcgcgcctgcgtcgaaggccgcgagtgcaatatctacgtcaacttcgccgttgaaaaagggcaacagctgaacgtactgctgcggccagaagatctccgcgtggatgaaatgcatcacggcagcgaagctgacggccttatcggctacgtgcgcgagcgcaactacaaggggatgacccttgagtcagttgttgagctggaaaacggcaagatggttatggtcagcgaattcttcaatgaagacgatccggactttgaccactcgctcgaccagaaaatggcgattaactgggtagaaagctgggaggttgtgctggccgatgaagaacaccagtaaattccagaatgtggtgatcgccaccatcgtgggttggcttgtgctgttcgtttttttgcccaacctgatgatcatcgccaccagcttcctgacccgcgacgatgcgaacttcgtcaaaatggtcttcacgctggataactactcgcggctgctggatccgctctattacgatgtgctgctgcattcgttgaatatggcgctgatggcgaccctcgccagcctggcgttgggctatccgttcgcgtggttcctggcgcgcttgccgcaaaagatacgcccgctgctgctgttcctgctgatcgtcccgttctggacgaactcgctaatccgtatctatgggctgaagattttcctcagtaccaaaggctatctgaacgagttcctgctgtggttgggggttatcgatacgccggtacgcattatgtacacgccgtcagcggtgatcatcggcctagtctatattttgctgccgtttatggtgatgccgctctactccagcattgagaaactggatcgcccgctgctggaggcggcaaaagatctcggcgccagcaagctgcagacttttatccgcatcattattccactgaccatgccgggaattatcgccggctgtctgctggtgatgctgccggcaatggggctcttttacgtctcagacctgatgggcggcgccaaaaacctgctgatcggcaacgttatcaagagtcagttccttaatatccgtgactggccgttcggcgcggcgaccagtattaccttaacgctggtgatggggctgatgttgttgatttattggcgcgcggcgcgtctgctgaataaaaaggtggagctggaatgatcggtcgactgctgcgcggcggctttatgaccgccatttacgcgtatctctacatccctattattattctgatcgttaactcgtttaaccgttcacgctttggtattaactggcaaggcttcaccaccgactggtatagcctgctgatgaataacgatagcctgctgcaggccgcccagcactcgctgaccatggcggtgctgtcggcaaccttcgccacgcttatcggctcgctcaccgccgtggcgctgtatcgctaccgttttcgcggtaagccgttcgtcagcggaatgctattcgtcgtgatgatgtccccggatatcgtgatggctatctccctgctggtgctgtttatgctgatcggtattcaattgggtttctggtcgctgctgttttcgcatatcaccttctgcctgccattcgtggtggtgaccgtgttctctcgcctgaaaggctttgatgtgcgcatgctggaagcggcgaaagatctcggcgccagcgagatgaccatcctgcgcaaaatcatcctgccgctggcgctgccggcggtagcggccgggtggctattgagctttaccttgtcgatggatgacgtggtggtctcttcgtttgtcaccggtccgggttatgaaatcctgccgctgaagatctactccatggtgaaggtcggcgtttcgccagaagtgaacgcgctggcgacgattctgttggttctttcgctggtgatggttatcgccagtcagttaattgcacgtgataaaactcaggggacgttaaaatgaaaaaatggtcacgccacctgctcgctgcgggcgctctggctttgggcatgggcgccgcgcaggcggacgatagcaaaacgctctacttctataactggaccgaatacgtgccgccaggcctgctggaacagttcaccaaagagaccggcatcaaggtgatctattcgacctacgagtcgaatgaaaccatgtacgccaagctcaaaacctataaagacggcgcttacgatctggtggtgccatcaacctatttcgtcgacaaaatgcgcaaagaaggcatgctgcaaaagattgataagagcaagctgagtaacttcagcaacctcgatccgcagatgctgaacaaacctttcgacccgaataacgactactcgattccctacatctggggcgcgacggcaatcggcgtcaatagcgatgctatcgacccgaaaaccgtaaccagttgggccgacctgtggaaaccggaatataaaagcagcctgctgctgaccgatgacgcccgcgaggtgttccagatggcgctgcgcaaactgggctattccggcaacaccaccgatccaaaagagattgaagcggcttataacgagctgagaaagctgatgccaaacgtcgcggcgttcaactccgataacccggcaaacccgtatatggaaggcgaagtgaaccttggcatggtctggaacggttccgcttatgtcgcgcgtcaggcaggtaccccgctggaagtgatttggccaaaagaaggcggcattttctggatggatagcctgtcgattccggcgaatgccaaaaacgttgacggcgcgctgaagttgattaacttcctgctgcgccctgatgtcgcgaaacaggtagccgaaactatcggctatccgacgccaaacctggccgcgcgcaaaatgctcagcccggaagtcgccaacgataaatcgctgtatccggatgccgccactatcgaaaaaggcgaatggcaaaatgacgtcggcagcgccagcgccatttatgaagagtattaccagaaactgaaagccgggcgctaaccccgtaaggcggaaccctggttccgccttttttccccctacccgcctgatgctgtagacaatgcacagactcagcggtggtcatctttcctcgcgcattaaaatctggccgtactcgtcacgaaggcgatttttcagcaccttaccggtggcgctaaccggcaacgcatcgataaaaattatgcggtcggggatctgcgatttcggcacccactcctgataccaggccagcagatcggcctcttcgacttcgcccccttcaacgcagacgcatagcaacaccgggcgttcatcccaacgcggatgacgtgcggcaatcgctgcggcgctgcgcaccgctggatgggcgatggcgatattctccagctcgacggtcgagatccactccccaccagatttaataatatctttcgcccgatcgtggataaccagatagccgttaacgtcgagggtgccgatatcgccggtatcaaaccagccatcagcggtcagcgcactctcatcgcgaccaaaatagtgatcgaccacccagtggccgcgaacctgcaaatatccctgacttttgccatcacagggcagcggtttcccgtcgatatccaccacccgtagaacgatgccgaaaatcggccgtccctgcccatcactctgctgacgctgctgctccgccgggagtgcggcgtgcttactgagcagcgtattgatcgtgccgatgggcgacgtttccgtcatcccccaggcatggatcagctcaatatcataatcgcgcttaaacgcttctctcatcgatggcggtaacgccgagccaccgacgaaggagcgcttgaaataaggcaggcgaagatccgatttacgcagcgccgccagcagtccggcccaaatcaccggcacaccaaaagccacgctgaccttctcggcgctcagcagacgcaacaggctatcgccatccaggtgcggccccggcaacaccaaccgcgcgccgaccatcgcggcaataaacggcgttccccaggcgttgacgtggaacatcggcactaccggcaacagcgaatcttgcgctgaaatgcctgcaccgtccggctggttgccgcttagcgcatgcagcaccagcgagcgatgggtattcagtacgcctttcggcctgccggtggtccctgaggtataacaaagcgaagcaggcgtcagctcattcaacccaggccagcaatagtcggcatccccctgctgtaacagctggtcaaaaaagcgtaatgacggcagcaaatcctgcgcgtcttcactatgcggctccatcaatacaatatgtttaaccgtcagtagttgtggctgcagttgccgtattaatggcaggaaagtctggtcaataaacagcacctcatcggcggcatcattgatgatatacaacagatgttcgaccgacagccgcggattgatcgtgtgcgtcacccaaccgccagacgcgacggcgaaatagatttcgagatgacgacggttattccacgctaacgtaccgcagcgggcgccagcgggcaggcccagcgttgccagcgccgaggccagccgtcgggcgttgcgggccacttctccccaacagctacgttctatttctccggcagtactcaccgagacgatttccgtctcgcgatgatactgcgccgcgtgttcgagtagcgctgaggtagttaagtgctgataaatcatcggcgaaggcatcacaggctctccttatacaggctgatgggcatggcggatggaatcgccgcagggtcttccaagataacgatcaacaccgcggcagagacaggataaagatgggattgatgacgaggcagccggaagctgcccgccgataaacgccaggtgctacgcgcgcagcggatggacgcgggatttgatcaacgcgtcctcaacatcgaaatggcttaaaggatagttgctggccaccaggtagaaacggccatcctgcgctggatattcgtgaacatgatagttcaccattttcggcgcaaccatcggctcatcatcaacggtgcgtttagcatctgaggcatactttgaacgtacggccaggcgggtagatttaatatcgctgtaagtttcgccatggtgctcgtcgccgaggatcaggtaatcaacgtactcaggtggcatctcacgctccttcttggtcgccagagagtaagaatatgccataaacgacggcagcatatcgcttcggtagtcacaatattgcaactaaaaaataacacattatgagtatcgcccggcaacgttccgggcgatagcggtgagacgattacagcagtgctttcgctttggcgacaacgttgtcaacggtgaagccgaactcttcaaacagctgctctgccggcgcagactcaccgaaggtggtcatgccaacgatagcgccgttcaggccaacgtatttgaaccagtagtccgcgataccggcttctaccgctacgcgggcagaaacggctttcggcagtacggattcacgataggccgcatcctgcttgtcgaacgcgtcggtggacggcatggagaccacgcgcgccttcacgccttcagcggtcagtttgtcccacgcggcaaccgccagttccacttctgaaccggtggcgatgaagatcagttccggctggccggcgcaatctttcagcacataaccgccgcgggccacgtttgccagttgctctgcggtacgctcctgctgcgccaggttctgacgggagaggatcagcgcggtcgggccgtcctgacgctctacgccatatttccacgcaatcgcggattcaacctggtcacacggacgccaggtggacatgttcggcgtgacgcgcagggaagcgacctgctctaccggctggtgagtcgggccatcttcgcccagaccgatggagtcgtgggtgtagaccatcacctgacgctgtttcatcagcgccgccatgcgtaccgcgttacgcgcatattccacgaacatcaggaaggtagaggtgtacggcaggaaaccgccgtgcagcgagataccgttggcaatcgcggtcataccgaattcacgtacgccgtaatggatgtagttaccggcggtgtcttcgttgatcggcttagagccggaccacagggtcaggttggacggcgccaggtcggcagaaccgccgaggaattccggcagcagcgggccaaacgcttcgatggcgttctgcgatgctttacggctggcgatcttcgccggattcgcctgcagcttagcgatgaactcgttagctttcgcgtcgaagtcagacggcatttcgcctttcatacggcgggtgaattcagccgcttcctgcgggaaagctttggcgtaggcggcaaacttgtcgttccacgcggcttctttcgcctggccggcttctttcgcatcccactgcgcatagatgtcagacgggatttcaaacggagcgtatttccagcccagcgcttcgcgggtcagcgcgatttccgcgtcgcccagcggcgcgccgtgggaatcatgagtgcctgctttgttcggcgaaccgaagccgatgatggttttgcacatcagcagggacggtttgtcggtgaccgcgcgcgcttcttctaccgcgcgtttgatggcgtcagcgtcgtgaccgtcaacgccgcgcaccacgtgccagccgtaggcttcaaagcgtttcgcggtatcgtcggtgaaccagccttcaacgtgaccatcgatggagatgccgttgtcatcatagaacgccaccagtttacccagtttcagggtaccggccagggagcacacttcgtgagaaatgccttccatcatgcagccgtcgcccatgaaggcgtaggtgaagtgatcgacgatgtcgtgtcctggacggttaaactgcgccgccagcgttttttccgcgatagccataccgactgcgttagcgatcccctggcccagcgggccggtggtggtttccacgcctgcggtgtagccgacttccgggtggcccggagtcttggagtgcagctgacggaagtttttcagttcttcaatcggcagatcataaccggtgaggtgcagcaggctgtaaatcagcatggagccgtgaccgttggacagcacgaagcggtcgcgatcggcccaggacgggttctgcgggttatggttcaggaaatcacgccacaggacttcggcaatgtcagccatgcccatcggggcgcccgggtggccggatttggctttctgtacagcgtccatcgagagtgcgcgcagcgcgttggcgcagcggcggcgaacgacaagtgtgttattcatagcggtcttccctgctgcttacagcatctgacgaatttggttttcaagcttcagttgatcggcggcaaacagccgaatgccttccgacagtttctccaccgccatcggatcctgatgatgctgccagagaaactcagcctggctcatcggcgacggtcgggtttcgctgacgtaacctggcttgagctgacgactgagcggcgcgtcgttagccgccagctcatcgagcagcgccggggaaatcgtcaaccggtcgcagcccgccagagcctgaatttgctcaatacggcgaaagctggcgcccatcactacagtgtcgtagccgtgggatttgtagtactgataaatctggcgtacggaaacgacgcccggatcgcggtcggcctgatattccgtctcctgaggttgatgcttttgataccagtcgtagatccgcccgacgaacggcgaaatcagatagacccccgcttcggcgcaggcgcgtgcctgggcaaaggaaaagagcagcgtcaggttacagttaatgccgcttttctccagctcctccgccgcgcggatcccttcccaggtcgccgccagcttaatcaggatccgttcggcgccgataccgttcttttcatacatctggattagcttgcgcgcctgcgcgacgcacatgccgcgatcccaggcgtaacgcgcgtcgacttcggttgagatacgcccgggtacgtggcgcagtacttcgctgccgatatccaccgccacctgatcgcaggcgttaatcagttgggtttgttcgctgccgccctggcggcgcgctttaccgatggcgtcggcgatcagcgcctggtactgcggaagttgggctgccttcagcaccaatgacggattggtcgtagcatcctgcggcgaaaactttttaatcgattcaatatcgccggtatcggcaacgaccacggtataggatttcagggtatcaagctggttcatagtctgttcctttcaaaaaaaccgggaattaatctctggcatgctggtgttcgtaataatcgattcgttcaactttcggcgctgaaccgccgccctcgtattctgccgccagccacgcctggaggatttttttgcctaattccgtgccgatgacccgtgcgccaagggtgataatctgcgcattattgcttttgcgcgcccgctcggcggagaatgtgtcgtgacactgcgcggcgcgaatccccggaactttattcgccactatgctcatgccaatgccggtaccgcaaattaagatcccacgatcgtgttcaccctgcttaatcgacatcgctaccgcgtgagcgacatccggatataccgtactgccctggcgtttatcgctgctgtaatccgcgacgtttattcctgactcctgcaaataagcgacgatgacatcgcgaaatgcataggcggcatcatccgcaccaatagcgatcgttttcatagttaattccttagcttaataacagatttaatttaaagtgtataaattgaaatgtggtcacccacgtttattattttgggtgtaatgccggccaggtgaaccattcctggtaattcagcccgcacggcgttatcaaaattcaaggtaatatggccaagctgttttaaattcgccgttgccacgctgcccaccgcggtaatgcgatactgcgtattatttagcgatagtatctgcccgggagctaattccgccgataaatcactggcgcggtgcagcgcacaatacatggcaatatccgcaggcgccggttcggcaaagagaattaatttattctccgtcagataatttgcgacgtattctcccacggcggtaattgacaacgaatacaacggcgatggcatattatttattcccccgtggcgcatgcgatggtagcgacaccggtttgtcatcttttactggcgtatcctctacctgcggggcgcgctttttcagacgtttgtcaaaccaggccaccagaaccggcgcggtgagcatggtaatgatactggcggtagccagctgcgcggtggcggcatcaacgtacatcgccagcgacggatccgcctgcgccaccagagctggcgtcagtgcggaactggcggccgtggtgccgagcgccgcgcccaatgcggtctttttcttaagaaacaggttgtacaggaagtagaaaataatgccggtgatggccgagataacgcccaacagaatacctgacagcccggcggtaaacacggtatcaatgcttgagttagcgccaatggcaaacgacataataatgattaccaacggctgcgacgcggcgcaaagctgtttgaagcgctcatcgagattcccccacagcatgccgatcagcagcgggatcagcatcgatagcagcgcggcaaaggggatattagccagaccgctgacgcccagcaccaccatggtgacgaagggaccgtctttaatgcaaaacaccgatatcgctccggcatcgctggcgtcgccatagttgctacacagcgcgatatacagtgaactgttagagctggttaaacaggcaatcagcgccagggtcgaaataccgaggaaaccagccggaccaaacatcgcccctgccgcccataccgccagcgccccggcaagacatttaaggaacagcagcaccgcgcctttatacaatggcaaaccagcctggcgaatattaatcgaggttccgcaaattaacaggaaaatccccatcatggcgctggagccaactttaaacagtgccgttgtcgggccgccaatcgccaacacctgcggcacaaaagtattaataagaatggcggcaagcagtggaataataattaatccaccgggtaccttattcattttatccaggatatttatattcatagggtagctcatcttagttatatatacccaacactcttcaagttgtatcgacgaatactgcaattacggctgataacttaaagtattcagggtacagagagaaaacgacgcaataccacccggactacaattacgtcgccttggataattaattttgtgcttctttataaatccgttcgacaatggtgctaataatgtcttccgggccggttaatccgcccttgccgacgcaaatcaacccggcataatcaccgccaataatccgcaccatatcggtttgcgggatcacgtagtcaatcatttcaataccggttgcgccaagctctttcaggacgttgaccatcgtgtcgccgccggtcatataaagcccttttatttccccaccggcgcagttcagcacctcacgcacgatgctgcccagtccctggttgatattctcagccgcctggccgtgagagagcccgaaacgctgctcctcttcctggagatccagaagccgaccggtcaacgccgactcaaaaacgaataaggcgttttgctgctgcggaatgcactggcgggcatgctgcaccacccgctgtacttcaatttccgcggcattctttttatccaccagcagttccgcatccaccgggatgtggcatacccgcggatcgttggcgatcaaatactgtaattgttttttggtcaccggcgtggcgctgcccgccaccaccagaatcgaaccacgctgctgctctgcggtctgcggagccagcgccgcgacgcgggcttcacgcatcaggccgcggcgcaccgccagccgttcagtaaagggccctgggtcgacggccagtacgttccagttcagcgccaccaccgcaccggcaatcgcatcaacatcctcgacggtgatcgcgtcaacgacgataactcgtactccgcgttgctgttgctcctgcagatcaatttcaatctgcgactcgcccttcattaccgaagagagagaaatatggccaacctgatgatgcgtttgcgccgccaacagccccggcacccaggattccgttaccggcgtgcggacatcgcgggcaacgtcggtacgcgacagcgcgactgaatcaataaccgaatagccgcccacaaggatccgccgcgactgcggcatcgccggcaccacgaccgccaccgtttccagcggcagttgttcgagcatggcgtcaatttcaaaaccgatgccgccgcgcaaggtggtatcgatgcgcttggtaaaatagtgcgcgccgcgcgcctgtaactgctgtaccgccgcgctcacctggtattgggcttcggctttcggcagcggccgactgtcgctactaaccaccatggccggatattccacctcattgcgcgagaaggactccgtatcaaagaaagccgccgtcttcaggccgctacgcgccagcaggacgccaagggtcgtcgcgccggtgagatcgtctgcgacgatacccagcgtgccgccttctccctgcggccacaccacctcaataccggcaggcgtgaccccggagacatatatttcctcgtggatatattccgccagcggtccgctctttccggtggggtgtaaattgatggtcgggatcccgcgtttcggatacaggccgcagcgcagggtgccgccgcagtcaatcaccatcaggccaatttccgcttccggcggctcgccatttttaaatacatcaacggctggccagccggtcagctcacacaggcgctcaactaccgggggacacatcccaccggtgatatacgcaatctttttcgcctgaccgatatttaccgtcagcggcccgccccagcctttactgcctttgctaatcaacagatgcttttccatctctctgtccttttgatttgcattaacgtcagcgattattgatgcttcattttccagtaacgcgcggccaccagcgtcgactccagcatactgacggtgcccgccttgccggtaccggcgatatcgaaggccgtaccgtgatccacggagctgcgcataaacggcagaccgaaggtaatggtgatcgaacgttcaaaatcgagcgtcttacaggcgatatgcccctgatcgtgatacagggagagaatggcgtcgtagcggccctgtttaccaagatggaacaccgaatccgccggtaccgggccaatggcattgatacctagctcttgcgccgctttcaccgccggaatcaggttatcggcctcttcatgaccaaacagaccgttatcagagccatgcgggttcagcgcggcaacggcaatgcgcgggttgcgaatattcagttcgctaaattcatggtggatttgttgcacacaggccagcacacgctctttgttggcgtaatcacaggcggctttcagcgccatatgacggctgacgaagaacacgcgcagattatgcacatggaacatagtcagcccgtagtcggatttggtctcaacctgatagatttcggtatggcccggcaatttacagcccgccagcttgatcgcctctttatggataggcgcggtagataccacatcgataagccctgccatccccagctcgatagatttcatcacataatccagcgacatctcgcccgccagtttttgcactttaccccattcgatgctgtcgcagtcgtattcgccagtctccatgatatccagcgtgccccaacggaaacgggcctgttccggatgcgtaatgcggttgatggcaaaatcgcagcccatgatcttcatcgcccgctcgacgatagcaaccgagcctatcagaaaagggttgcactcgtcatagacgcctttgtccatcatggtggcaacggtgatctccgggccgatccctgccggatcgccgatggtgattgcaacaacgggttttttctcttgtgacatcgtgagcctctcgtggtagaagttagttgttcatatgttcactatcaaatcagatgttcaaaacattacctgatgatcgcgtaaccattagtgatgccgatcacataaaataatctgagaatttatttcatcaaaaaacgtgatctaacatgtgttcacacaatgataaaaagttcaatctcagtgctatcagcacaaatcgatgtgacaagctattgattttattaatcaggagaagtgaagatgaaaccgatatggttaggaaccagctggaagatgaacaaaccgctatcgcaggcgctagcctggtgcgaaaccctggcgcaacgtttaccgcaggtgacgcatcctgatattcaatcctttgttattcccccctttaccgccattcatcccgtcagccgctttatccagcagcaccatctgccgtgtctgaccggcgcacaaaatatgcatgaagcggagaacggcgcgtggacaggcgagatttccgccgccatgttgcaggaaaccggggcgacactggtcgaacttggccactcagaacgacgcggcgcgttcaatgagtgcgacgcggccattaaccaaaaggtgcatagcgccctgcgccatggattacgcccactgatctgcatcggcgatagcgctgatgaaaagcgctggcaggtgtctcaagaaagcgtagtgcggcagatgaaaatcgccctctatggcctgagcgatagtcaggtgttgcaaacgctggtggcctatgaacccatctgggctatcggcgaacagggtacgccggcgacgccggaacaggccgcggcggtgcatcaggcgttgcgtcaggcgctatgcgcgactttcggcgatgagaccgggcaacgtattcccctgctctacggcggcagcgtcaatctgcaaaatgcggtagaactactgcgccagccggatatcgacggcctgtttatcggccgcgcggcatgggacgccaacggctattgtgaaattgttcaacgcgttacacaggaatttattcttcaggcgcagtagtattaaggggacaccagagatggaaattccacgctatgaatgaacaagactcagattacgcgctgctcactgaaatcgcagtcgcctattacgatcgggaacagacgcaggaagagatagccaaacgtttcgggatctcgcgcatcaaagtggggcgactactgaaaaaagcgcgtcaggaaggcatcgttgagataagcgttaagtaccacccggtctttagttcgcagattgaacagcagtttatttcgcacttcgggattaaacgcgcgctgattgccctcgatcatcatgatgaagatgagcagcgccagcaggtggcggcgttggtaagcaactatcttgccggcgtgttaaagaatgatatgaccgtcaccgtcggtcaggggcggaacgtggcggccgtcgctaatcacgttggcgtattcccggagcgcaactgccgcttcatctgcggcatcggcggcaccaagcgcgataatcagctcattgacgccgaccatatcagccggaatctggcgcgcaaatttaacggctttagtgaaacgctgtatgcgccagcctatgtcgaaaccccggagctacgttcggcgtttatgcaaaaccgcctgatcaaagccacgctggagcaggccagcaaagccgacgtcgccatcattggccttggcgatatgaacgagaacagctttatggtccaactcggatggttcacaccgcaggaaatcgcttccgcgcggcaggatcagggcgtggttggcgaccttgcagggtatagctttttcaatattcagggtaagccggttgatacagtaatgaatgaccgggtgatcggcctgagcctcgagcaactgcgttccattccttgcgttatcgccattgcttcggaaagcactaaagcgacggccatcctcggcgcgctccgtaccggggttatagatgtgctggcgaccagcgcctcaaatgcccgctcggttatcaatatgcaaaaagcgctataaaaccgccgcgtcagacgcggcggtttgacgttaagccgttacagccctttcagcagcttatcaatgaactcgggcaccacttcgcttgccagcccgtaatgtttctcagcgaattcgctgccgacctggctgggttcaaggtttagctcgacggtatgcgcgccgtgcagacgggcttcatggacgaaacccgccgccggataaacgtgaccagaggttccaatagcaataaagatatcggcctcggccaacccgctgtagatctcatccatccccagcggcatctcgccaaaccacaccacgtgcgggcgcagcgccgccgggaactggcagcagtggcatttgtcatccaccgtcacgtcgccggtccattccagcacctgcccgctccacgaacagcgtactttcagcaactcgccatgcatatggataacccggcggttacccgcgcgctcgtgcagattatcaatattctgcgtcaccagcagaaaacgatcgccaagcgcctcttccagcttcgccagcgccagatgcgcggcattaggcgcgatttccgcgctctgcaactggcggcggcgggcgttataaaacgcctgcaccagcgccgggtcgcgggcaaaaccttccggtgtcgccacgtcctccacccggtgttcttcccacaggccgtcggcggcgcggaaggttttaatccccgactctgccgaaataccggcgccggttaacaccaccacccgcggtttgtctattgcctgcggcggcgttttgtcttcgccaaagaagacacgttgccgtaagcgatcgcgtaactggcgttttttacggcggaaacggcttaagcgatgtaagcggcgcgacagcatagctacccctgtaattaatgagtcaaatgaaggaaggccgcaccgcgcatacctccggcgtcgccatgacgcgcgcgctcaatgcgcggcacccgggcgaccggaagcaaatgacgcggcaggcgctgcgccagcccttcggttatagcagtaaaattagataatccgccacccaacaccagcagatccggatcgacaatggtgaggatattgcccagacaaacggccagtagatcgagataacgctcgacgtgctcccgcgcctgcgcatcaccctgcagccacagatcgacgatctgcggagaagttaaggattggtgataaaaatgctgatacagccaggcgaatccgcggccggaaagatagttctcgatgcagccgagctgaccgcagccgcaacgggtcagcggaaaatcgcgccccaccacttccagggcgtctaccggtagacgaatatggccgaactcgccggtgatgtagctgtggccggttatcgatttgccgttaagcacgatcccgccgcccacgccggtgccgaggattaatcccatcaccagcggatattgagtaaattcatcatcccacgcttcagataacgcaaagcagttggcgtcattatcaagacgcacttcacgccccaggcgcgcgctgagatcaacgcgcagcggttggccgctggcggcgggtacgttggcggcatacagcttgccctccgcggtttccggcatgccggggataccgataccgaccgcgccctccacgccaaagcgccgatcggcttcgcgaaccagcgcttcaatagcctgcaggaaagcctcatagctttccgttggagtggggacacgtttttcccactgcagttgccgggcgttatcaaatacgcccaatgctatcttgctgccgccaatgtcaaatccgtagtacatttcagccattcctcttattggccccaacccctcatcctttgggctgtatctgctttcacagcactggcctaagggatgcggcgtttgacgggccacgacgataaattactggccactcagcaccctcgccgggtcaatacgactggcgcggcgggcgggataccagctggccagcaaactcagcaacagtgctgtcaccagcacataaacgacatccagccagtgcaattcagacggcaggaagtcaataaaatagatgtcgccggaaaggaatttatgcccgatcaacgcttcgataccgttgataatcgatgtcagcttcagcgcggctatcacaccgatcactaccccgatcagactcccgaccgaaccggccaataaaccataccatacgaaaatcgcgcggattaagccgtctttcgcgccaagcgtgcgcagcaccgcaatatcgccgcttttatctttcaccgccatcaccagcgtcgagacaatgttgaaacaggcgacgccgataaccagtaccatggcgagatacataatggcgcggatcatctgaatatcacggtacatatagccataagtgccgatccagctcttgatatagacgtagctgttggtcacttcgccggcgtcgcgtaccagcgtattcgcgtgaaacacgtcggtgactttaatggcgatgccggtcacgctgctgcccatatccagatactgctgggcgtccgccattgggatcatcgcgaagctatggtccagttggccgctcagttgcagaatcccggtcacgtgtagcctgacgcgtttcggctgcaacagctggtgctcggaatctgaattggggatcatgatcgacacccaatcgccctgcttcacgtgcagcgcatcggcgacgcctttacccagaattacctgttgctcgccggccttaaagttggcccatgcgttgttctgcacaaagtttggtagcgaactcaggcggctctcctgctgcggatcgacgcccttgacctgaatggcgcgcatattgctgccgctctccaccaacccggtaaagttgatataaggcgcagcggcgacgatgcctttcactttttcaactttcgtcagcgcttcgttccagttattccacggctggttaaccggctcgatttcgccgtgcggcaccaccgccagaatgcggttgttgagctcgcgctcgaaaccgttcatcgcgctcaggccgacgatcagtaccgccacccctaatgcgatgccgatagtagagatgacggaaatcagcgagaccataccgccgcggcgtctgccgcggctaaaacgcagcgcaatcagtaacgataacggtgaagccattactgggcccccatcagggtcaggtcagccgtcaggcggccatcgcgcatctccaactggcggttcatgcgtttcgccagctgcaggtcatgggtcaccaccaggaaagcggtacgctgcgccacgttgagctcgcccagcagctcaaaaatactgtcggcattgcgggcgtcgaggttgccggtcggttcatccgccagtaccagccgcggtttgttcaccagcgcgcgagcaatcgccacgcgctggcgctcgccgccggaaagctccgacggacgatgatggctacggtgttccaggccgaccgcctgcagcatcgctttcgcctggcgttcgatatccgccgcttttttcttgccaatcagcagcggcatcgccacgttttccagcgcggtaaaatccggcagcagatggtggaactgatagataaagccgagttcgcggttacgcagatcggcgcgagccgcggcggagagcgagctcatcggctgaccggagaaaataacatcgccggaagtcggcgtatccagcccgccaagcaggtgcagtagcgtacttttgccggagcctgaagagccgacaatcgccatcatttcaccctcttgaatgctgaagctgacatcgtgcagcacatcggtttgcacgttgccttcctgatagcgtttgcacaggttgtcgcattgcagcaggatcttattcataacgtaaagcctcagcgggttgggtggcggcggcgcgccaggaaggatacaacgtagacagcagggccagcgccatcgccaccagagcgataataatcacctgcagcggctcaatcgccaccggcagggccgcgccgtccaaaaacgcgccgataatcggcattaaattattcagctggctggccaacagcacgccgagcagcgcgccaagcagcgcgcccactatcccggcgctggcgccctgtaccataaagacggccatgatctgccgcggcgtcagcccctgggtctgcagaatagccacctcgccctgcttctccatcaccatcatgccaagcgaggtaataatgttaaaagcggcaacggcgacgatcaggctcagcagcagccccatcatatttttttccatccgcacggcctggaacagctcgcctttacgctcacgccagtcctgccatttggtaccttccggcagcgtctgttggctgagggtgtcaacctgcagcggctggctaagccacagtcgccagccggtaatattgcccagtggatagcgcatcagacgagaggcatcatcgatattggtcagcatttgatagccgtcgacttcgctgttggcggcgaaggtgccgatgacgttaaacaaacgctggctcgggacacggcccatcggggtaaactggctggcggaaggcaccatgatgcgaatttgatcgccgcggttaacccccaactgacccgccagctgttcgccgagaatgacgttatatttgccggcctgcaaatcgctttgtttcacgttcaccaggtaaggcgtcagcggatctttttgcgccgggtcgatacccagcatcacgccgacggcgacgctgcgggcgctttgcagcaccacatcaccggtggtgatcggcgcgacgcgcgtcacgccctgcagcttaacggcgctttccggcattttttgcgggttgatagagccctgctgggcgctaatgatagcctgcggcatcagccccaggatgttgttttgcagctcgcgctcaaaaccgttcatcaccgacaggacggtcaccagcgccatcacgccaagcgtaatgccgatggtcgaaagccaggaaacgaaacggccgaagcggtcggctgcgcgcccgcgcatgtagcgaaggccgataaatagtgcggcaggttggtacatgtaatccatctggttgctgatagccgatgttcgagtatatatggcatagcccaacgcgtaaatcgctgatacggtagattttttcgccaaaataacaaaataatagttttaaatcagaaagttaatttagagtgtgtatatttatcaatcgccacacgctgtagaaaacatggcgcagaaggccattcgggttggcgaaatcagaccaattgcggataatcagagacattgaatatcagcaatttgcccctacatcgaagagcgagttggccgactgcggccaaacagtacacacaatcgcctgatgggataggcgctaagggatcctgacaaccgttatgcctgaacaatatcgctatactctgccggtcaaagccggcgatcagcgccagcttggcgaactcaccggcgccgcctgcgccacactggtagccgaaatggccgaacgccatcatggcccggtggtgctggtggcgcctgacatgcaaaacgccctgcgtttgaatgatgaaatcaggcaatttaccgatagcatggtgatcggcctcgctgactgggaaaccctgccctacgatagcttttcgccacatcaggatattatctcttcgcgccttgcgactttataccagttgccaaccatgcagcgcggcgtgcttatcgttccggtcagcactctgatgcagaaggtctgcccgcataattatctgcacggtcacgcgctggtaatgaaaaaagggcagcgtctgtcgcgcgatgcgctacgcacgcagttggacagcgccggttaccgccatgtcgatcaggtaatggaacacggcgaatacgcgacccgcggcgccctgctcgacctcttcccgatgggcagcgagcagccctatcgcctcgatttctttgatgacgaaatagacagcctgcggttattcgatgttgatagccagcgtactctggaagaagtcgaggccatcaatttgctgccggcgcatgagttcccaaccgaccaggcggcgatcgaactgttccgcagccagtggcgcgatcgctttgacgtgaagcgcgatccggaacatatctaccagcaggtaagcaaaggtaccctgcccgccgggatcgaatactggcaaccgctgttcttcaacgagccgctgccgccgctgtttagctatttcccctccagtacgctgattgtgaataccggcgatctggagcacagcgccgagcgtttccagaatgaaacccgcgcccgctttgaaaaccgcggcgtcgatccgatgcgcccgctgctaccgccggaacaactgtggctgcgcagcgacgaactttttagcgagctgaaaaaatggccgcgggtccagttaaaaaccgagcgtctggcggagaaagccgctcatactaatctcggctatcaacccctgcccgagttggcgattcaggcgcagaataaagcgccgctggacaacctgcgacgcttccttgaatccttcagcggcccggtgattttctccgttgaaagcgaaggccgccgcgaggcgctgggcgagatgctggcgcgcatcaaagttgcgccaaaacatatattgcgcctgcaggaagccagcggaaatggtcgtttcctgatgatcggcgccgccgagcacggatttatcgacagccaggctaatctggcgctgatttgcgaaagcgatctgctgggcgaacgcgtcgcccgccgtcgtcaggattcccgccgtaccattaaccccgatacgctcattcgcaacctggcggaactacatatcggacagccggtggtgcaccttgaacatggggtgggtcgttatgcggggatgaccaccctcgaagccgggggcatcaaaggcgaatatctgatgctgacctacgccaacgacgccaaactgtacgtcccggtatcgtcactgcatttgattagccgctacgccggcggggcggaagaaaatgcgccgctacataaactgggcggcgatgcctgggcgcgggcaaggcaaaaagcggcggagaaagtgcgcgacgtcgccgccgaactgctggatatctacgcccagcgcgcggccaaagaaggcttcgcctttaagcatgaccgcgagcagtatcaattattctgcgatggtttcccgttcgaaaccacgccggatcaggcgcaggcgatcaacgccgttctcagcgatatgtgccagccgctggcaatggaccgcctggtctgcggcgacgttggcttcgggaaaaccgaagtggcgatgcgcgccgccttcctcgccgtcgaaaaccacaaacaggtggccgtgctggtgccgaccaccctgctcgcccagcagcactacgataacttccgcgaccgcttcgccaactggccggtacgcattgagatgctatcgcgtttccgcagcgccaaagagcaggcgcagatcctcgaactggcggcagaaggtaaaatcgatattctgatcggcacccataagctgctgcaaaatgaagtcaagctgcgcgacctggggttattaatcgtcgatgaagagcaccgcttcggggtgcgtcataaagaacgcatcaaggcgatgcgcgcggacgtcgatatcctgacgctgaccgccacgcctattccgcgtacgcttaatatggcgatgagcggaatgcgcgatctgtccattatcgccaccccgccagctcgccgtctggcggtaaaaacctttgtccgcgaatatgacgcgctggtggttcgcgaggcgatcctgcgtgaagtcctgcgcggcggtcaggtttactatctgtataacgatgttgaaaatattcagaaagcggcggatcgtctggcggaactggtgccggaggcgcgaattgccatcggtcacggccagatgcgcgaacgcgaactggaacgggtgatgaatgatttccatcaccagcgttttaacgtgctggtctgtacgacaattattgaaaccggcatcgatatcccgaccgccaataccatcatcattgagcgcgccgatcacttcggccttgcccagctgcaccagctgcgcggccgcgtgggtcgttcgcaccatcaggcctacgcctggctgctcaccccgcatccgaaagccatgaccaccgacgcgcagaaacgcctggaagctatcgcttcgctggaagacctcggcgccggctttgccctcgcgacccacgatcttgaaattcgcggcgccggcgaactgctgggagaaggtcagagcggacagatggaaactatcggcttctcgctgtatatggaactgctggagaacgccgtcgatgccctgaaagagggtcgcgagccgtcgctggaagatctcaccagccagcagacggaagtggagctgcgcatgccggcgttgctgccggatgactttattcccgacgtgaacacccgtctgtcgttctataagcgtatcgccagcaccaaaaacgaacacgatctcgatgaaatcaaagtcgagctgatcgatcgctttggcacattgccggatgcggcgcgtaatttgctggatatcacgcgcctacgccagcaggcgcaaaagctggggatccgtaagctggagtgcaatgaaaaaggcggcgtgatcgagtttaacgagaaaaataatgtgaacccggtctggcttatcggtttgctgcagaagcagccgcagcattaccggctggatgggccaactcgtcttaaattcttccaggagctggatgagcgtaaaacacgtatggactgggtacgccagtttatgcgtcagttggaagaaaacgccaccgcttgataaaaaagagatgcggttgtcagaaccgcatctctttacctgtcacagttagcaaactttacaaacattttgcaatccacctggatttcccaacactctcccgcgccataattgacattgattatcttataaaaataaccatttgtttattatggaattatggtaatgataaatatctcgcgtgtttcaacctggcttacggcattcgctctcgcggtgacgctggcccttcccgcccgcgccaatacctggccgttaccgccgagtggtagccgtctggtcgggcagaatcagtttcatgtagtgcaggataacggcggatcgctggaagcgattgccaaaaaatacaacgttggttttctcgcgctgctgcaggctaatccaggggtcgatccttatgtgccgcgcgccggtagcgtactgaccatcccgctgcagacgctgctgcctgacgccccccgtgaaggtctggtgctcaatatcgccgagctgcgcctgtactactatccacctggacagaatagcgtgaccgtttatccgatcggtatcggccagcttggcggcgataccctgaccccgacgatggtcactaccgtttccgataagcgcgccaaccccacctggacaccaaccgccaacatccgcgcgcgatataaagcgatggggatcgatttgccagccgtagtccctgccgggccgaataacccgatgggacatcacgcgattcgtctcgcggcctatggcggcgtctatctactgcacggcaccaacgccgattttggtatcgggatgcgcgtcagttcaggctgtatccgcctgcgcgatgctgatataaagtctctgtataacaaaatcacgccgggcaccagggtgaatatcatcaacgaacctatcaaagtttcggtagagccaaacggtacccgtctggtggaagtccaccagccgctgtccgaacatatcaatgacgatccgcagacgctgccaatcgtcctgaatgccggcatgaagaattttaaacaggcaccgcagaccaatcagcaggtgatggaatacgcgatggagctacgctccggaatgccggtcgatgtgacccgccatcagcttcccgctgagcaagccatgtagtgcatttccggatggtagaatgtaaaaaacccgccaggcacggcgggtttttttgtggcaatcgccagcttcgctgacgaggtttcgcggggcgcggtcccatgaaggggtgtggaccgcgtcgcgagagtggcataacaaagggaacgacttttactgcttactacacgcgttctgctgaagggggtcaggaacgcgttttgtcagtggcatgacaggggttacaacatttatttatagataactgcggtaccgtgcagggtattaggaccggttaccgaggtaatacggtaagaggtcgcccccatctcgtcggctttctgcgccagctgctcttcaagcgaacccagattggtgccggcggatgcggaaacggtaccgattttatgttgacctgctggggtggattgcacctcaacagcggcgaaacttgcgaatgagagtgagctcagtacggcagcaagtgccagtttttggacgtttttcatgattattatacctatgcagatgatttttatagtagggtcgcaagaattaacttaacgatcgataggtaaatgataatgtgatccaggtcacaggtcaactcatttttataacgatcatttaactatttataaaatgcttaattttcatacatatatgaattatttatttttggacttctgccgctggtagcgtgacacgtttatttttataatggccgttcaacaacccaacataggtacaacggcatcatgacaactgacgttcaaagttgcgcaaaaaaaagccgtggccgacctaaagtgttcgacagggacgcggcgctggacaaggccatgacacttttctggcagcacggctatgaagcaacttcgctggccgatctcgtcgaagcgaccggtgcgaaagccccgacgctatacgccgagttcgtgaacaaagaaggcttattccgcgcggtgctggatcgctacatttcccgcttcgccgccaaacacgaagccctgctattcgatgaccacaaaaccgtcgatcaggcgctgcgcgactatttcaccgctgtcgccacctgctttaccagcaaagataccccggcaggctgttttatgattaacacctccgcggcgctggccgcctcttcaaccgatatcgccaacaccattaagtcgcggcacgcggtgcaggaacaaacgttgacgcaatttttacagcagcgtcagcaacgcggcgaactccctgcgcagggcaatgtcttgcagctggcgcagtttttaaactgcatgctgcaaggaatgtcgatcagtgcgcgcgaaggcgctgattttgccaccctgaaacagattagtgacacgacgctgcgcctgtggccgcaaatcctgcaaccttaatcccctaccggcggccgtcgctcgccggttttttcccttctgctgaatacccttacttttctcaacattttcattatgttgatttgttgtaaatgatattgataacgataatcaatatgtgcaaaattcgcatttgtctttctatatgtttcacgctgtaacagccgcgcctatggctgaaaaaaataacaacagtaatgactaactcatatcaaggaatgcgaatgaacaagcgcctctggctgctcaatcctctgctgctggccaccgccctgccagcctttaccgcgcaggccgccgatgaagatgatattatcgtcagcgccaaccgtaaccaccgtaccgtcgccgagatggcgcaaaccacctgggtgattgaaggccaggagattgagcaacaggttcagggtggtaaagagtttaaagatgtcctcgcgcagctgatccccgggatagatgtcagcagccaggggcgtactaactacggcatgaacatgcgcggacgcgccatcgtcgtgctcatcgacggcgtgcgtctcaattcatcgcgtaccgatagccgccagcttgatgccatcgatccgtttaacatcgaacatattgaagttatttccggcgccacgtcgttatacggcggcggcagtaccggcggtctgattaatatcgtcacgaaaaaaggccagcaggaacgccaggtggatctagagctgggtggtaaaaccggctttgccaatagcaacgatcatgatgaacgagtagcggcggccgtcagcgggggtaccgatcatgcttccggccgattgtcggtggcctatcagcgcttcggcggctggtatgacggcaacaatgacgcgctgatcctcgataatacgcaaaccggcttacagcattcggaccgactcgacgtgatgggtaccggaaccatcgaaattgatgaccagcgccagctccagcttgtcacgcagtactataaaagccagggcgatgattatggtctgaatttgggcaaagatatgtctgcggtacttggcgaaagtaaagcctggacctctaacgggcttaactccgatcgcgtgcctggtaccgagcgtcatttgatcagtctgcaatactccgacgccgacttcttcggccagaatctggtcagccagatttattaccgcgacgaatcactgaccttctaccccttcccggccctgagcaaagggcaaatcagcagtttttccgcttcacagcaggataccgatcagtacggcgctaagatcaccttcaacagccagccgctgacgggatgggatctgacctggggcgttgatgccgaccatgaaaccttcaactccaaccaaatgttcttcgacctggataaagcaatggcttccggcggcctgaataatcagtcagcctacaccaccggccgctatccaggctacagcatcaccaatctcgcgccgttcctgcaaaccagctatgacctgaacgacatcttcacccttagcggcggcgtgcgctatcaatggacggaaaaccgcgtcgatgattttgtcggctacgcgcagcagcaggatgtcgctaaaggcaaatatcagtcggcggatgccattcctggcggtaagaccgattatgataacttcctctttaatgccgggatcgtcgcccacattaccgaacgtcagcagacctggtttaacttctctcagggcgtcgaactaccggatccgggcaaatattacggtatcggcagctacggcgccgcggtcgacggccatctgccgctggtctcgagcgttaacgtcggcgactcgccgctacaggggatcaaagttaactcctgggagctgggctggcgttacaccggcgacaacctgcgcacccagcttgccgcttattactcgacatcagacaaaaccatcgtagttaaccgcagcgatatgaccattgatgtgcaatcggataaacgacgcatttacggcgtggaaggcgcggtggactacttcgtgcctgatagcgactggagcctgggcgctaacttcaacgtgctgaaatcgcaagtaaaaaccgatggcagttggcagaagtgggacgtcaccctggcctcgccgtcgaaagccaccgcctgggtcggctgggcgccggacccgtggtcgctacgcgtgcaaagccagcaggtatttgatttaagcgatgccagcggcaataagcttgatgggtacaataccgtcgatttttatcggtagctatttgctgccggtgggtaaactgacctttagcatcgaaaacttgctgaacgaagattacgtcaccatctggggacagcgcgcgccgctattgtacagtccaacctatggcagcgccgggctgtacgaatataaaggccgtggccggaccttcggcctgaactacgcgttaacgttctaataaaaaaagcccctcagcctgagtgattgaggggctaatagcttaaaactgctgttttacgctttgttattcagaatcagctgaccgttgctgtccagcgggatttgcgcccccggctggtggtccatgcggattttgccctgctggtcgccgattttataggtggcatcataaccgagcattttttccgacttgtcgtaaaccgtcttacagcgctgctgggtggtggtataggtgtcgttatcctgcatcgagccctgaatttggttaccggcatagccgccgcccagcgcgccaaccacggtagcgacatcacgccctcgcccgccgccaaactggtggccaatcacgcccccggcgaccgcgccgagaacagaaccggcaatacggttttcatcctgcaccggacgacgatgggtaacggtcacgttacggcattcctggcgcggcgtttttatgctttcttttatcggcgtactggacaccacttgcgcatattgcgggccacgatctaatacattgagaccggcaacggcggcgacgcccaacgcggcggcaacgccaatcccaatacccgccaacattgatttattcacgggaattcctccttcattgctgttactagcaattctgcgtgctgctcagggggtatgcaaatcagaaagcggatgaaaaatgcgggaacctacggcaaatcaaggggattcagaggattcctaacaggaattagcgattctggcagaaggatatgctgtgttttcaggatagcgccgcgatggcgctatcctgattgctgacagcttagtgcagcttgagacgcggacgaatgatgcggttaatacgtcctaccaacatcatcaggccggtcttgaaatagccgtgtaacgcaatctgatgcatgcggtacagcgagatatacacgaagcgcgcaattcgcccttcaaccatcatcgagccacgcatcaggttacccatcaggctgccaacggtggagtagttcgacagggagaccagtgaaccgtgatctttatagacatacggtttcagcgctttacctttcatctgcgccagaatgttattcaacgcgcaggtcgccatctggtgcgccgcctgggcgcgtggaggtacaaagccgccttccggacgagcgcatgaggcacaatcgccgatagcgtagatatccggatcacgcgttgtctgcagcgtcggctccaccaccagttggttaatgcggttggtctccaggccgccaatctctttcatgaaatcaggcgctttgatgcccgccgcccacaccatcaggtcggcatcaataaattgaccatctttagtgtgcaggccgttaacgtctgcgctggtcaccatggtctgcgtcaggacacgtacgccaagcttagtcagttcattgtgcgcggcgccggaaatgcgcggcggcagcgccggaagaatacgttcgccggcttcaaccagcgtcacgttcagcgcttcgttggtcaaccctttgtaaccatagctatgcagctgtttcaccgcattatgtagctcggcggacagctcaaccccggtagccccgccgccaacgatggcgatattgaccttaccgttggcgccgaggtttgcagaatacttgaggaacaggttaagcatttcctgatggaaacggcgcgcctggtgcgggttatcaaggaaaatgcagttttccttcacccctggcgtgttaaagtcattggaggtactacccagcgccatcaccagcgtgtcgtacggcagcttacgctcggcaaccaacagctcgcctttctcgttgcgcagttccgcgagagtaatggtctttccttcgcgattgatatccaccaccgatcctaactggaactggaaaccgtggttacgcgcatgcgccaggtagctcagcgcatcaacgccctcatccagagaaccggtcgccacttcatgcagtagcggcttccacaggtggctatggttgcgatccaccagcgtaattttcgcttttttgttgcggcccagctttctacccaactgagtagccagttccagtccgccggcaccaccacctacaataacgattcttttcaatggcgtagtcacaagaccccctaaaagtattaaccaattgttaattaaaagttatccaaatagctcttagttaacaacaagttgcagcaatgaaaccattcagcaggaccgagaatagcatgaacggaacattggtcataccaaaattgatgtgcatcaagttttaccgcatattttttaaacgaacaacgtcaattatggacaagaaaaagcccgcggcgtttgcacgcggcgggctgagaaagggaaaacaaggttagccgagggtcttaaaagcctttattcgctgcagatgcggtgaaagacttttaaatttgtgcgtctgttcttcatcccagatgatttcgtaataatgatgcagcacttcagccgagcgttggctatccagcgcctcatcatggcgtgatagcatcaccaggcagcggtcgcgatttttttcgcggaagttgttcacgcacttggtggcgatatcctgatactcttccggcctgtcgattttcccttccatgttctcgtaggggaacaggttcgggttgaacacggcctgccgaatatcgcagaggaaaccgatcctttccgcccagtaaccgcctaacccgacgccgcatatgagcggccgatcgtcggcagtgagctgcagcattttgtcgacttccttcaacaaatgctgcatatcatgttttggatggagcgtactgtagctaatcaaccgcacgtcagggtcgataaactgcagctgcagcaccttttcatggttaccggggctgttagagtcaaaaccgtgtaaatagataatcatcgtatcctcaccagacaacaacgcccttcaggttaactacgcagacttcgcttcttgccagcgcgcatggagctgttccagctgtgcgcttaccgtttgccaacgagcggaatctcgcagttcctgacgggtaaatgaacctttatgatacaattttgtaacacgctctgctttgatcggggacaggttatccaatacgctcaccgcgcctttacgattattgcagaccaggatcatatcgcaaccggcatcgagcgatgcctgcccacgttcagcatagctgcccatgatcgccgccccttccatcgacaggtcgtctgagaaaatgacgccatcaaagcccagctcgccgcgcagcaccgttttcagccagtattctgaaccactcgccgggcgcggatcgatgtcagagtaaatcacatgcgccggcataatcgcatccaggcgttgttcatcgatcaggctcttgaacaccgccatatctttagcacggatttccgctgccggacgcggatcaaacggtgtctctttgtgtgaatccgccgtcaccgcgccgtggcccgggaagtgtttaccggtggttttcataccggcggcatgcataccgtcaatgaaatgacgcgccatcaccagcgccttttgcgggtcttcatgccatgagcgttcgccgatcgcagcgctgatgtgccccacatccagcaccggcgcgaagctgatatcaatatccatggcaatcatttcgctggccatcagccaaccggcttctgcggcgagcttaccgccctcttccacccccagcagcgcggcaaaagactgcgcggccggcagacgggtaaaaccttcgcgaaagcgctgcacacgcccaccttcctgatccaccgccaccacgagatgattacgcgaggcctcgcggatttggcgtaccagttcgcgcaactgcgccggatcgtggtagttgcgggtaaacaaaattaagccgccgaccaaaggatgagccagaatctcacgctcttccgcatccagttcaaaaccttcgacatccaacattaccggacccacacagacctctcttatcctttattttctgtttttaactgacgccatgtcgcatccgccagtgcaataaattgccggtcgccgctctgctgccagcgccgctcataccagcccgccatcaatataagtacccacggccgccaacgctgtatttgccgccgcagttgctgcttatcaattcgggcaaagcgcgaatactcattgagcagctggcaacgcgtattggcattgcaccataccgccgccagttcaagcgcgatatcgccatctcccgcatactcccagtcaatcaagcgcagaccgtcgcggctatgaataatattaccagcgtggacgtccatatgcagaggcgctaaacgcaacggccgcggttcacgctggcgcaataaccgtttatgccagcgcagccagaaaacggtgcgcctggtcggatcgcactgctgccagtacaactcaagcaacggcgccagctcgatgcgccagccaaaacgcggctgttggtgcagatgatacaataacccggcaagcgaagggcactccggcagcgcgcttttcacttctcctgcgcaatactccaccaccatccagcgtggcgaaaagaacaccggcgccggcgaaagcgacgccggaaggtgctgaagcgcacggtactggcgcagaaaatggctgagcggcgccagcggatcgtgaggctggcgcaacaccagccgacggacgccatcgctgataacgcaactgccgccgctaagaccgttttcagtcaaggcggcgacaggtgaatagcgaggaaagaagcgcgacaagagctcgtcgcgcgtaagcttattgttgctgaaccgcacctttgcctgaccagataatctcgccggactgcaccagcatcagctgcattttcagctccggcgcattcacgttgccggtggcgttggaatacagcacgtactgtgcgccaacggtgcgcgcaatccccatcgctttgctgcggctgccgagactatcctgcgccgacaggcccagctgttgtttagccaccgcaagctgctgagtcgataccagcgtaaacttgccgttgcccgccagcgcgttgcgcagcgcggaggtcgcttcggccgcattcagcgatccgttggtacggttattgacgctatccaccaacagaatgctgccagcgttcactccgccggcctgcagcatctggccgaccattggttgtacggcggcgtcccagttgtagtgacgaacgcgcggagcaggctgagacggctgcgatggctgttcgccgccgtgttcgatcggccccggctgcgttggtaccgtcggcacggcaggcaccgtcggctgcggctgcgcaggttgttccggcttcggcttcgcctcctcgaccggcgcaggttcattacgttgccccacacagccagccaggaatatcgccagtgctgtgattaacgcatagcgacacattttaatcattatgatgacctcttaaagataaagataaaggcgggctttgtgcgccccgagaatattggcactgccgtagagcacgacggacgagcgtgctggaaccgtcacgctacgcgcagggtccagcggatgcatctcaagcccatgggcgtcataccagaaaaaacggtagtgcacggtaatgggctcttgccgttcattaaataatcttgaggtagcggtggcctgaatttccgaagcggtcaccgacggcggatcggcgctgatgccagccgccagaacgctggattccatcaccaacgtctgctgctcgccaaccggaatttccgggtgcgagctacatccggccaacagcgccgccagaaccaggacgcctgaataagcagcacgcatcgatttagcctttatacgccagcatcgggcccaacggacggccgcccaacaggtgcatatgaatatggtaaacttcctgcccgccgtggcggttgcagttaacgataagacggtagccgtcgtcagccagaccttcatcacgggcaatcttcgccgcgacggtcatcattcggcctagcgcctgttcgtgttcggcggtgacgtcatttacggttggaatcaggatattcgggataatcagaatatgggtcggcgcctgcggagagatatcgcgaaaagcggtgaccagttcatcctgatacacaatatccgacgggatttcccggcgaatgattttgctgaaaatcgtttcttctgccatgactgattccttattagttttataccgtgccccggcctgcctctgcagataaacacgaatgcacaggatcagctaagagtatgagcgacttcctccctctctttcaacctgaatgcagtttttcttattcaactatagacttagccgctgagggaataagcatttcccccattttccgggtattgccaaacaatgaccagaataccaacgtaaaaaaggcagccatttggctgccttagtctccccacactacgtcttagctattgcggatgtactcatccatctcggttttcaggttatcggacttggtgccgaaaatagcctgaacgccggaacctgcaacaactacgccagcagcacccagttttttcaggccagcctgatcaactttcgctacgtcagccacgcttacgcgcagacgagtaatacatgcgtcgaggtttgtgatgttctctttaccaccgaaggcggcaatcagcgccggcgccatttcactggtcgcagcggatttgctgtcttcagttgcatcttcacggcctggagttttcaggttcagcgctttaatcagcacgcggaagaccacgtagtacacgatcgcatagcaaataccgacaatcgggaacagccacagcttgctgctgttgccggaaagaacgataaagtcgatcagaccgtgagagaacgacgtcccgtcacgcatacccaacaggatacagatcgggaatgccaggcctgcaagaatcgcgtggatgatatacaggatcggcgcaacgaacatgaaggagaactcgatcggctcggtaataccggtcaggaacgaggtcagcgccgcggagatcataataccgccgactttggcacggttttctggtttagcagagtgccaaatcgcgatagctgcagccggcaggccgtacattttgaacaggaagccgccagacagtttacccgcagtcgggtcgcctgccatgtaacgagggatgtcgccatggaacacctgacctgcagcgttggtgtattcaccaatttgcatctggaaaggtacgttccagatatggtgcagaccaaacggtaccaggcaacgctcgatgaaaccgtagataccgaacgccacaaccgggttctggtaagcagcccactgagagaaggtctggatggcggagccaatcggcggccagatgaaggacaggatcacgccggtgaagatagcggcgagaccagagataatcggcacaaaacgcttgcccgcgaagaagcccagatattcaggcagcttgatacggtagaagcggttgaacatgtaggctgcaatcgcaccggagataataccgccaagcacgccggtatcagccaggtgtttggctgcgatttcctcagcaggtaaatgcagaaccagcggcgcgactaccgccatggttttcaccatgatgccgtaagctacgactgcagccagtgcggatacaccgtcgttattggtgaagccaagcgcaacaccgattgcgaagatcagcggcatattggcgaaaactgaaccgcctgcttccgccatgacgtgggagaccacggctggcagccagctgaagttggcagaaccgacgcccagcaggatacctgcaataggcagtacggatactggcagcatcagcgatttaccgaccttctgcaggttagcaaatgcattcttaaacataattgagagtgctcctgagtatttggtacttttttacgctttcacgcattggcccggggggagaaccgtgccgtggacaggacatctaagcgccctttatttattacacagagtaaaataattaacgcggacattgtttgacggctatcacgtttcattcagtcaacatataaaaatttacactgatttacataatgtgtatctgtatgttgcaaaaatgcgctcaccgcctctgtcgcggcggtgaactttactcgctttaactattaattacgagccttaaaataatagaaagatcaggcgggttgcagtctggcagggtcgatgtggaacaagctggcaaagttatcggtggtttgttgcgcgagctgctccagcgacacgcccttcagcaccgccatgtattcagcgatatcgcgcaccatcgccggctggttctctttaccgcgatgtggtaccggcgccagataaggcgaatcggtctctaccagcaagcgatcgagcggaacatagcgcgcggcatctcgtagctgctccgcgttacggaacgtgacgataccggaaaacgaaatataaaaccccatgtccagcaatttacccgctgtctccctgtcttcagtgaaacagtgtagtacgccaccgcaatccgtcaccttttcttcctgtaaaatcgccagcgtatcggcgcgcgcatcgcgggtatgcacaatcaccggcttattcaattcgcggccaatgcggatatgctggcggaaagactcctgctggcggagtttcgtttccggggtataaaaataatcgagcccggtttcccccatcgccactacgccctcttccgcagccagcgaacgcagctcttcgaagtcatacgcttcatcctggttcaatggatgaacaccgcaggaaaagacgacattttctcgctggccgactaactcgcgcatcccgcgatatcccggcagcgtggtggcgactgccaggcaaaacttaacatcacgcgcggcggctttcgccagcacatcatcgacatctttatgcagcgtttgataatccaggccatcaagatggcagtgggaatcgactaaaaacatgttcttattctcagagatgtgagacgggcagaaccgccccgggttgcaggtaatgttcccagcgcaggaggcgctcggtgagtagtagttcgcggttgacgccgaccacgctcagcaactgctcgcgacaggcgctaacatcgcgcgtgatagcttcaagacgtgggcccgaaagtgtttgcgccagttggttaaccagcgtccaggcatctggattactcagaagcgtaatcccctgttgccgcttctgcgcatccagcaacagcgatgccagccagtgcagacgcaccggggcctgttcgtgattcagaaccggcaataatgacagccagtcaccgctggttaacgcgctggctaacgcctggcaaagctgttgtcgcggagcccagttagcctcttgcagtaactccagcgctgccgcgggtgcgttagcgctgaggcgcaacgcggccaataaagcttcttgtgacattgtcacttcacgtgctaaccaccctaacgcccaggcttcagaaggcggagtaaggtgatatgagaagcaccggctgcgcaaggtggcgagcagacgcgccggctccgggcaggccaggaaaaaccaggtattttccggcggctcttccagcgtcttcagcaaagcattggcggcggcatcggttaacaacgtcgcatcgttgatccacaccaccttcgcgccgccgagacgcgcacgctcatagagtttttcagtgatgccgcgcaccgcatcgatgcctagcgcgctcttgcccttctccggaaccagagtgtagtaatcaggatgggtccccgcctgcataagctggcagctatgacaatggccacagcttttatgcccttccggctggcggcacatcaggaaacggcataacgcgtagataagcgcatcgccccccatccccggtaatgcctggagtaataacgcatggtgaccccgtcctgcctgatagccagacactagctgctcgaaggacgggcgtaaccacggataccatttcatgcgcgttgctccgcaacccattgagtgataacggcgcgaatgtcgcgctcaaccgcttccagaggctgcgtcgcatccaccgtgcggatagtcggatcctgcgccgccagttcaaggtagcgcgcgcgggtacgattgaagaaattcatcgactcctgctcaatccgatccagatcgcctcgcgcgcgggcgcgcttaaggccaacttccggcgtcacgtcaagatagagtgttaaatcagggcgaaaatcaccgagtaccgcatcgcgtagcgtcgccagcatcccctgatcgataccgcgccccccgccctggtaggcctgagttgagagatcgtgacggtcgccaatgacccattgaccgcgagccagagcaggcttaatcaccgtttccaccagctgtacgcgggcggcgtaaaacatcagcacttccgctttatcgttaatgacttcatcgccggtagactggatatccagcaccaggctgcgcagtttttcagccaggatggtaccgcccggttcacgggtaaacaccatatcgcggatacccagctgttccagagcctcaacgaccagattgcgtgcggtggttttccccgcgcccttccaggccttcgataacgatatagttactgcgcattttttttccttaagtacttttaaatagtcctgaacccgaacggttatggctggccagattggtattgaacgtatgggcccggccttttggccgtcggcacacaaaatagaaggtacggcgttttcgccggatgaggatgcgcattgagagacgcttcgcccgggcacggcgattggccctggcggcataccgctaatcacataggtgttataagcggtcggcgtctccagatctttacgcgacagtttaccattatagcgctctcccatgccgtaaattacggtagggtcggtctgcaaacgcatgccaatgcgtagacggttgataaaaaccgacgccacgcgatcgcgctcggcaggaaccgcggtctctttctcaacgatagaggccatggtcagtaactggttttgatctttatagggtagattatccgcccgcccttcccaggctttcgctaccgcagcgaccattttctggtgcgcgcgtttaagaatggcgatatcgctggtattggcggtgtacatccaggtatccggccataaccaaccttcaacccaatcggcgtgctcaagacccagcgctttggcgaccgtttcgtaactgtcgtcttctaaagtgtgcttcacatacggcgcatcgcgcagctgacgcaaatagtcgctaacgcgcatcccttcaacaaaccgtagcgggaactgcgcttctttaccgctcgctaaaagctgcagcatctcgcgcaccgtcatttgcggtgtgaagcgataggtacccgctttgaaatgagaaagttcaggttcgacgcgcagcagccactggaatacgcgtggacgattaatgattttatcgccatacagctgctggccaagcaccactcgcccggttcctggctcaagggtgaagatggtctcttctttaataagcaacttactatctgccagttggcggactttccacatacctgccgctgcggcaataccgaacaccacgactaacagcaggacaaaacgtaacattttcttcatgactaaccaggcagctcacacaatggggctaaaaaatggtaaagatcgcgttcagaccaacagacgtcatcccaacgacaaaccggtaccagcggcataagcgcattgcaaatcagcacttcatcggcatcgcgcagtacatcagggcgcatggatacttcgacaacatcaaaagaagaacgtgccaacatagccatacagtgctggcgcataatgccattaacgcccgcctgatcgaggcgcggcgtgaacacctggcttcctttacgccagaacacattcgcggcacagcattccgtaagccacccgtcgctgtcaagaaccagcgcctcatcggcgtccgtctgctcaagatgagaacgaattaagacttgttcgaggcgattaagatgtttgagccccgccagcgaaggattgcgccccaggcggatcgggcttaacgccagggttattccctcttctcgccaacgcgcataatgcgcggggaaagacgacacactcatcatgcgggtaggttgaatgcatccgctcgcgctatatccccgacctcctgaaccacgcgttatgaccactttgagtacgccttctcgatgtggctttgccagttcttgcatttctgcggccaacgtttcccattcagaaaaaggtatcaagagtttttcgcaagtatcttgcaagcggcccaaatgggcattgaagaaggctatctggccgtcgatgattcgcgaggtggtaaaacacccatcaccgaattgaattgcacggtcgtttgctgccagcacatcctgctcgacaccatttatcaagaacatagggggctcctctcaccggtggcacagtgtctcaggataaaaagcagagaacaagcggagaaaaccgaataaaaaaagacccgccaggcgggtcttttcgtcaacgcttaaaccagcattagcggttgatcatacttttttgaagataatcgaaccgttagtaccgccaaagccgaaggagttacacagggtgtattccataccggaaacctgacgcgcttcatgaggaacgaagtcgaggtcgcaaccttcatccgggttatccaggttgatggtcggcggaaccgcctgatcgcgcagcgccagaatagagtagatagactctactgcgccagccgcgcctaacaggtggccggtcattgatttggtggagctcaccatcacgcggcttgccgcatcgccaaacacggatttcaccgcctgggcttctgctttatcaccggctggcgtcgaagtaccgtgggcgttgacatagccaatctggcccggttcaatcgccgcgtcgcgaatggcgttaaccatcgccagcgcagcgccagcgccatcttccggtggagacgtcatatggtacgcatcgctgctcataccaaaaccaacgatctctgcgtagattttcgcgccgcgttttttcgcatgctcgtactcttccagcacgaccataccagcaccgtcgcccagcacgaagccatcacgctctttatcccacggacggcttgccgcctgcgggttgtcattgcgggtggacagcgcgcgcgcagcgccaaagccgcctacgcccagcggcgtactcgccttctctgcaccaccggcaaccatcgcgtcggcatcgccataggcgataatacgtgccgcgtggccgatattgtgtacgcctgaagtacacgcggtcgcgatggagatactcggtccacgcagaccaaacatgatggtcagatgaccggccaccatgttaacaattgtggacggaacgaagaacgggctgatcttccgcggtccgccgtttaccagcgaactatggttttcttcgatcaggccgaggcccccgataccggaaccgatagcggcgccgatgcgggttgcgttttcttccgtcacttcaaggccagaatcctgcatggcctgaacgccagcgacaattccatattgaatgaaggcatccatcttgcgctgttctttgcgcgagatgatatcatcacagttaaaatcctttactaagccagcaaatttcgttgcataggcgctagtatcgaaatggtcgatcaggctgatgccactctgaccggcaaggagagctttccaggtagactctacggtattgccgacaggagacaacatgcccagtccggtcacaactacacgacgcttagacacggttgtcctccagggagggaaaatagattcttgtgggacaaaaaaagataaaactcaggcggtcgaatgaccgcctggagatgttcacttacgcctggtgaccgttgatgtaatcaatggcagcctgaacggtggtgattttctcagcttcttcgtccggaatctcagtatcaaactcttcttccagagccattaccagctcaacggtgtcaagagaatcagcgcccaggtcttcaacgaaggaagcattgttggtaacttcttcctgcttaacgcccagctgttcgccgataattttcttaacgcgttcttcgatagtgctcatactcttaaatttcctatcaaaactcgctttcgcgatggttttcgtagtgtataaaatgttgaaaaatttgcaactaaatcccggcaggtcttaccacgattttacgctattttgcggctgtttgccctaataacgcaaatgatttcgcacaaaactgtacccgcaagcgtgcagactgcgcgcttcctgaacattttgcgcaaatctcggtcagaccatatacatcccgccattgacgtgcagggtttcaccagtgatgtaacccgcttcgtcagaggctaagaatgcaaccgcgctggcgatttcatttggggagccaaggcgccccgcaggaactgcagccagcgtacccgcacgctgctcatcggtcagcgcacgcgtcatgtccgtttcaataaagcccggagcaacaacgtttacagtaataccgcgagacgcaacttcacgtgccagtgacttactgaaaccaatcagacccgctttcgccgcagcgtagttagcctgaccagcatttcccatggtaccaaccacagaaccgatagtgataatacgcccatgacgctttttcatcatagcgcgcattaccgcttttgacagacggaatacagatgacaggttggtttcgataatatcgttccactcatcatctttcattcgcattaacaggttatcacgagtaatcccggcattattgaccaggatatcaacttcgccaaactctgcgcgaacattttccagaacagattcaatagatgccgggtcggtcacattcaacatcagacctttaccgttggcgcctaaatagtcgctgattgcctgcgcaccgctttcgctggtggcagtaccgataactttcgcgccgcgcgcggcgagggtttcagcgattgcgcggccgataccgcggctcgcaccggtaaccagcgcgatttttccttcaaaactcatggtattcctcttttattgctcaagcgccgcagacatcgcagccggctcgttgagcgcagaagcagtcagggtgtcaacaatacgtttggtcaggccggtgaggactttacccgggcccatttcatacaggtgctcgacgccctgagatgccataaactcaacggtcttagtccactgaaccgggctgtacagttggcgaatcagcgcgtcgcggatagcatcaggcgcggtttcacacttcacgtcgacgttgttcacaactggaatggtcggcgcattaaaagtgattttctgcagctctaccgccagtttttcagcggcaggtttcatcagcgcgcagtgagacggtacgctgaccggcaacggcagcgcacgtttggcgcctgcggctttacacgcagcgcctgcacgctcaacggcttctttgtgcccggcgataaccacctgacccggtgaattgtagttcactggcgaaaccacctgcccttgtgcagattcttcacaggctttagcgatggacgcgtcgtcgaggccaataattgcagacatcgcgccggtaccttctggtaccgcttcctgcatgaatttgccacgcagttcaaccagacgaacggcatcagcgaaattaatcacgcccgcgcagaccagcgcagagtattcgccaaggctatgaccggctaacagcgccggcgctttaccaccctgctgctgccatacgcgatataacgcgacggaagcggtcagcagcgccggctgcgtttgccaggttttgttcagttcttctgccgggccctgttgggcaagcgcccacagatcgtaacccaacgctgcggaagcttcgccgaaagtctcttcaataactggccaggtcgcggccatatctgccagcataccgacagcctgagagccctgtcccgggaacacaaaagcaaattgcgtcatgtttaaatccttatactaaaaacgaaccagcgcggaaccccaggtgaaaccaccaccgaaggcttccagcagaatcaactggccgcgttgaatacggccatcgcgaacggcttcatcgagcgcgcaagggaccgaggcggcagaagtgttaccgtgacgatcgagcgtgaccaccacattatccatcgacattcccagctttttcgccgtcgcgctgatgatccgcaggttagcctggtgcggcaccagccaatctagcgccgagcgctcaagattattggccgccagcgtctcgtcaacgatatgcgccagttcggtgaccgcaactttaaacacttcgttgccggccatcgtcagataaatcggattttccggctctacgcgatcggcgttcggcagcgttaacagctcaccgtagcggccatcggcatgcagatgcgtggaaataatgcctggctcttcagaagcgccaagcaccactgcgcccgcgccgtcgccgaagataatgatcgtaccgcgatcggttggatcgcaggtgcgcgccagcacgtcggcgccaatcaccagcgcgtaatctacggcgccgtttttcacatactggtcggcgatgctcaacgcgtaggtgaagcccgcgcaggcagctgcgacgtcaaacgccggacagcctttgacacccagcatagattgaatctggcacgcagagctcgggaaggcatgagtacccgaggtggtcgcaacaacgatcagaccaatttgttccgggttgacattcgccatttccagcgctttctttgcggcttcgaagcccatcgtagcaactgtctcgttcgctgcggcaatacggcgttcacgaatacctgtacgtgtgacaatccactcgtcagtcgtttcaaccattttttccaggtcggcgttagtacgcacttgctcaggcaggtagctgccggtgccaataatctttgtatacatgtacgctcagtcactcttgggtaatatacccgcgttgttcaaaccgcagggcgtcagtcgtatccgttggtcccggtgtgctgtcgggcattcccgttaccgctgctgctccctggcagttcaaagcctgctgggtataacgattccaggcgagcggcgatccgctgtggaacctgccgctgcaccgcctgcactgcctgctctattgcgacgcaaaatgcgcgctggttggcagcgccatgacttttgatcacagaaccgcgcaatcctaacagacaggcgccattatactggtcggggttgaggtgactgaatcgcctgctcaggcttttttgtaaccaacgctttaataaaatcagccaccacgaccgtttttttccctctccctgtgatttcagcagcgaaaggaacatcctgacaacaccttccatcgtctttaatgtgacgttgcctgtgaatccgtcacaaaccagaacatccgttttccccgtcaacagttcgttagcttcaaggtaaccaatatagttgaaggacggcagttttttgagcattgccgacgcatcgcgaatgctggtgagacctttcatctcttcttcaccgatattcaacaacgcaatgcgtgggtttttaatccccaccacttcttcagctaacactgcgcccattacggcgaactgcaccagcattgtactgtcgcaatcgacgttagcgcctaaatccagcactaccgttttgcccttttgctgatgcggcagtaccgtcaccagcgccgggcgctcaatcccctcaatgggcttaagcaataacttcgccaatcccatcagcgcgccggtatttcccgcgctaacgcaggcttcggctcgcccttctttcaccagctccagcgccaggcgcatcgagcttccgcggctactgcggatagcctgcgcgggtcgcgcatcactggcaataactgactgtgcagggataatctgcagtcgcgaacgttgttcgaaatcagctttggcaagtaatggcgtgatggcgtcggggtcgccgactaaaagaagtgtgagttgcgaattagagttcagtgcctgcagtgctgcaggcactgtcacggatgggccaaaatcgccccccatgacatctaacgccagggttagacgtgtcaaggtatcgtcgctgcccggttcggttattccccagttacctggggagatcctcactaagcttcaccacgcttttactcttgtctttcacgttacaaggacgttgactacgttttcttgcaacgtgaaatccacggagtaaggcgtgattacttagcgattaccttgcgaccgcggtagaaaccgtcggcagtgatgtggtgacgcaggtgtttctcaccagaagttttgtctacagacaggctggtgactgcggtcagagcgtcatgggaacgacgcatgccacgtttggaacgggttggtttattctgttgtacggccatggaccttactcctcaattacttatgctttaagctggctaatacggcaaatgggtttggtttttgtgcctcttcaggcagttcgccaaagaccatgtccgcgtcggacacttcacagtgttcagaatcatgcaccggaactaccggcaaggaaagaatgatttcatcctcaaccatcgcctgcagatcgatttcaccgaattcgttaacctcaatcggctcatacgcttccggtagtgcttctgcctgttcgtcatttctgacagggctgaaacaatacgttgtgtgaacatgatgagggaacggtttcccgcaacgctgacattcgagggttaccgacaccttcgcatcaccggtaataacggcgagacgctggttatcgatagcgaacgacatactgcattccacatcactgtccacgctgacgactgaatcggcgacacggccaacctgatcacgggcgtagataccctcgtaatcaaggcgtttttgagccgtgcgaaccggatcgagagtcaggggtaattttaccttttgcatagggcgcgcatattaactttgtaatgtcatagagtcaaagaaaaaggcagcctcaggttgccttttgccatttattcgcacacattgcggcgcatagtttaaaatgatgctctgcgaagcgctatatgtggatgaaaaaatatgtctaatcttctcctggcctcaacctcgccgtggcggcggatgctgctggaaaaactcacgctgccgttcgaatgcgcggcgccggaggttgacgaaacgcctcagcccggcgaatccgctcgccagttggttgtgcgtctggcgcaagccaaagcccaggcgctggcatcccgcttccctcagcaccttattataggttccgatcaggtttgcgtcttagacggcgaaatcaccggtaaaccgcacactgaagaaaacgctcaccgtcagctacgcaaagccagcggcacgattgtcactttttataccgggcttgcgctctacaattccgccaacggacacctgcaaacggaatgcgaacccttcgatgtccattttcgtcatttaagcgatcaggagatcgaggcctatatccgtaaagagaaccctctgcagtgtgccggcagttttaaaagcgaaggcttaggcatcacgctatttgagcgactggaaggacgcgatcctaattcgctggttggattaccgctgatagcgctatgccagatgttgcgccgggaaggctttaacccgctgcttagctagccataaaagaaagcggcggagtatgaatccgccgctgtgcttatttgctattgcgcaaaacctgcaagcagtgtttcagttggttatccaacggcgcttcaatacgcatcacttcaccggtgcctggatgagtgaacttcagcgctgccgcatgcaaaaacagacggtttaaacctgtccctgaaagctgcttgtcaaactcgcgatcgccataacgatcgtcaaaagcaataggatgtcccgcatactgggtgtgaacgcgaatctgatgcgtacgcccggtaaccgggctgcagcgcaccaacgtggcaaacgggtaacgctcttccactttaaagcgcgtttcggaaggcttaccttcctggctcacgcgcacgatgcgctcgccgctctgcagaatatttttcagcagcggcgcttgtaccaccttcgtgtgcgactgccactgaccgcggaccagcgccagataatccttctgcatccctttctcacgcagttgctcgtgaagcgagcgaagcgccgaacgttttttcgctaccagcagaacgcctgaggtatcacgatcgagacggtggaccagttccaggaaacgggcctcagggcgtagcgcgcgcagcccttcaatcacgccgaagctcagaccgctaccaccgtgcaccgcggtgccggaaggtttattcagcaccaggatatgctcgtcttcatagaggataacatccgacagcgccgccactttttgcagatgcggcgaaacggcctcttcttcgcgctcggcgaccctcaccggcgggatacgcacttcatcgccatcttccagtttatattccggcttgacgcgttttttgttcacccgcacctcgcctttacgcaggatgcgataaatcatgctcttcggtacgcccttaagttgcgtacgcaaaaagttgtcgatacgttgccccgcttcatcggcggaaatggcaaccatttttacggttggagtctcagttttcatggtcggcgattctaaatagccgagggcattagcgccactcatttttatatgcttatatttatcagtatccggttttcatcgcatgcttcatcggcgttttgtttgttattagaacaatctgtagacgctggtgaaaaaactgtgagtaacccggtgataaaaggtaaaagtgaacttgctataacaaggttagcaatggaataatgaagccgttttccgtgttgacacttgttagaacaagaaattagcggaatgaccaattttgtctgaccgatcatccacgcagcaatggcgtaagacgtattgatctttcagacagttagcgggctgcgggttgcagtccttaccggcacaggctctataagatttttgcgtggcaggacggcatcgactccggaaccaccgggagttcatctgaatcctccgattaaccaccgggagttcatctgaatcctccgattgaggtgaacaggttaagccattactcctgcgacgtgagagacgatgagaatatacgcaacatcgtttgaggtgcgtcaaggctgcaaaagagagaatcttcagtcggttgtacaagcaatcgattgaggtgaacaagcgcggccaacgcgaaatcacttaaaggatgaagtgtataaatggaatattctctggtgatacatcccaggctgttcccctgaataattgcgctgtgtttccgtttgaaacacaggcgaccgacactctgcgcctcttaagcgcgcgacaaccgtgaggttggcgacgtgaaccagactcgaggccatcggttttcacccggtaaggcgttactctgcccgtagcttagtcgtcaatgtaagaataatgagtaagttacgatgaaaagaatgttaatcaacgcaactcagcaggaagagttgcgcgtcgctcttgttgatgggcagcgcctgtacgacctggatatcgaaagccccgggcacgagcagaaaaaagcgaacatctacaaaggcaaaatcactcgtattgaacctagccttgaagccgcgtttgtcgattacggcgctgagcgtcatggtttcctccccctcaaagaaattgcccgcgaatacttcccagccaattacagcgctcatggccgccctaacattaaggacgttctgcgcgaaggtcaggaagtcattgttcagattgataaagaagagcgcggtaataaaggcgccgcgctgaccacctttatcagcctggcaggcagctacctggtactgatgccgaacaaccctcgcgccggcggcatttcgcgccgtatcgaaggtgacgatcgtaccgagctgaaagaagcgctggcgagccttcagctgccggacggcatgggtcttatcgtgcgtaccgcgggcgttggcaaatccgctgaagcgctgcagtgggatctgagcttccgcctgaagcactgggaagcgattcagaaagccgctgagagccgccctgctccgttcctgatccaccaggaaagtaacgttatcgtgcgtgccttccgcgactatctgcgccaggacatcggcgaaatcctaatcgataatccgaaagtgcttgagctggcgcgccagcatatcgccgccctcggtcgtccggatttcagcagcaaaatcaaactgtacaccggtgaaattccgctgttcagccactaccaaattgaatcccagattgaatccgcgttccagcgtgaagtgcgtctgccgtccggtggttctatcgttatcgatagcaccgaagcgctgaccgctatcgacatcaactccgctcgcgcgacccgcggcggcgatatcgaagaaacggcgttcaacactaacctcgaggcggctgacgaaatcgcacgccagttgcgtctgcgcgaccttggcggcctgatcgttatcgacttcatcgatatgaccccggtccgccaccagcgtgcggttgaaaaccgcctgcgtgaagccgtccgccaggaccgcgcgcgtatccagatcagccatatctcgcgcttcggcctactggagatgtcccgccagcgtctgagcccgtcgctgggcgaatccagccaccacgtgtgcccacgctgtagcggcaccggtaccgtgcgtgacaacgaatcgctgtcgctctctatcctgcgcctgattgaagaagaagcgctgaaagagaacaccaaagaagtccacgcgatcgttccggtacctatcgcttcttacctgcttaacgaaaaacgtgccgcagtcagcgcgattgaaacccgccagagcgacattcgcgtcatcatcgtccctaacgatgagatgcaaaccccgcactactccgtactgcgcgtgcgtaaaggcgaagaaacctccacgctgagctatttgctgccgaaactgcacgaagaagagatggcgatgccgtctgacgaagaaccggctgaacgcaaacgccgcgaagagccagcgctggctgctttcgtgatgccggatgcgccgcctgcgccggtacaggaagaaaccgcagccgcgccgaccgcagcgaaagccgccgctgctccggcagcgaaggtagcaacgcctgcccagcctggtctgctgtcccgcttcttcggcgcgttgaaaaacatcttctccggcgcagaagaagctaaaccggctgaagtcaaagccgagcaaaaaactgaagagaaacctgagcgtcagcaagagcgccgtaaaccgcgttctaataatcgccgcgaccgtaacgaccgtcgtgataaccgcgataatcgtgacaaccgtgataatcgtgataatcgcggagaaaacacagaaggtcgcgaacctcgtgaatcacgcgaggagaaccgccgtaatcgtcgtgacaaacaatcacagaacgctgaactgcgcgaatctcgccaaaacgcgggcgatgagtctgataaaggcaaatcacgcgatgagcaacagcaaccgcgccgtgaacgcaaccgccgtcgtaatgatgacaagcgtcaggcacagcaggaagcgaaaactcagacccgcgaagaaccggtagtacagcaggaaaccgagcaggaagagcgcgttcagagcatgccgcgtcgtaagccgcgtcagctggcgcagaaagtccgctttgaatccgcagaaaccgagcaggttgtcgaagccgttgctgagcagcaggcggaatccactacgccgcgtacggaactggcaaaagtcgatctgccggccgtcgttgaaactgccgctgagcaggatgaaaacggcgacgctcgtgaatctaacggtatgccgcgtcgctctcgtcgttctccgcgccacctgcgcgtaagcggccaacgtcgccgtcgttaccgcgatgagcgttatccgacccagtcgccgatgccgctggccatcgcctgcgcgtcgcctgagctggcgtcaggtaaagcgtggatccgctatccaattgcccgtgcgcatgatcagcagcaggaagagttaccggtacaggaaaccgccaacgttgagcctatcattacgccagtcgtcgcggagactatcgctccggttgtcgttgcggaaaccgtcgcagctgaaactgtcgtaccggcagtggccagcgaaccgaccgtagttgaagctccggtcgtcgaagaaacggcggtggttgaagagaccgcaattgttgcggaaagcgttgcgccgcaggcagaagtcagtgagccagcagagccggtagtcgaagaaactgagaccgcacctgctccagctactgaagaaaccgtcactgcgcagccaacgattgccgaagaagaaaccgctgttgtcgaagaaacgaccgttgcctccgttgaagaagccgcgccggttgttgaaccgacgccggtcatcagcaccgcgccagtggtgaaagcgcaaccggcgaccaccgctactcgccatgcgaccgcgccgatgacccgcgcaccggctccggaatacgtgccggaagcgccgcgccaaagcgattgggttcgtcctccgtttgcctttgagggtaaagggtctgcaggcggccatagcgccactcatcaagccacggcggaagctacccgtccgcagcctgtagagtaacggtgctcaacgaaaaaaccggccaactggccggtttttttatttcttctcgtccgggcgctgcatccccgccacctgtggcatcacttcgcgcatcaaatcgagaaacttgcgtagccgcgtcggataatagcgcgcccagggataaaccagatgcaccggcagcggcgaagcccgccactgcgcaaacggctcaatcagcctgcctgccgcaatatcctcctccaccgcccaactggaaacaattgccgcccccagccccgccagggcggtgttacgcgcaacgtagacgctatcggtactcagacaagggacaatcgggaaactcaccaactgcccgtccacctgatgctgtagcgtgacttcatgctgataaaaggtgctgatagcgacccatggcagcgcggagagcgcctgcggttcgctgagttccggatggcgcgccaatagctcaggcgcaaccaccaggctgcgaggaaccacagccaacagtaccgataccgttgatggatcgacttccgcgccaacgcggatcgcgcaatcaatattatcgctaagaaaatcgacggttttatcattcagcatccactcaacggagagctcgggatatcgctgcagaaaactcaccagcggacccagcaactgctgttggccaaaagcgtgcggcgcccgcacccgcagcacgccaaccggccggtcctcctcgatgcgcaaatcatcttccagcgccagccagctgtccaccagccgccgcgcatgttgataacagcgctcgccgtcatcggtcagtttcatcgcatgggtcgtgcgcagaataagcctcgcgccaagtaacgtctccagcgactgcaaacgtcggctgacggtcgcctgagtcgtactcatctgcagagccgccgccgagagcgaacccgcttcgacgatgcgaataaaggtccgcatcagctcaatccgatctatacgctcttgtttcttcatttatattttgcctatacgtgctacgtataaccgttttaccactaccctatcttccgcgccagtctgcttcagggaacaatagcgccaacgcatttacgagggcactaccatgacaccgcttcctttatccccccgccaggccggctgggttatttttattctcgcgctcggcgctggcttcagcgtcgcatccatctactacgcccagccgctgctgccgttaatcggcgccaacctgcatctcagcgttgaaggaatggggctggtgcccaccctgacccaggctggctatgcattgggaatattatttctgctgccgctcggcgatcgccacgatcgccgaacgcttatcctgctgaaaagcgccgtgctggcggaactgttgctactctgcagcctgaccggtcagcttacctcgctactggtcgtcagcctgctgattggcatggcggcgaccatggcgcaggatattgtcccggcggcggcgattctggcgccggcgggcaaacaggggaagatggtcggtacggtgatgaccggcctgctactggggatcctgctttcacgtaccgtcagcgggctggtcggcgcgctatttggctggcgggtcatgtaccaggctgcggcagtcagtatcgcctttatcggcctgttaatgtggcgtgttgtgccgcgttttgagatccactctaccctcagttatccgcagttgctgaagtcaatggcccatttgtggcagcgctatcccgcgctgcgccgcgcggcattcgcccagggctttttgtctatcgcctttagcgcgttctggtcgacgctggcggtgatgctcgccgaacattaccagatgggtagcgcggtcgccggcggcttcggtatcgctggcgcagcaggcgccctggcggcaccgctggcaggcggtttggcggataaagttggcgcggggagagtcacccagctcggcgcggcgttagtcaccgtctcctttgccctgatgttgctactgcccgcgttgccggtacacggccaactggcgctgattgcgttatcggctatcggttttgaccttggtctgcagtcgagcctggtggcgcatcaaaacctggtttacagcctggagccccaggcccgcggcaggcttaacgccttgctatttaccgtggtcttcatcggaatggctctgggatcggtgctgggaagtaaactgtacgtgctggctggctggaacggtgtggtgattctggcggtgagcagcggcgcgattgctctgattatccgcctgctggaaaatgctcgtctacaggccgcagaacgcgccgtgagataaaaaaacccgctccgcatggcggaacgggttaatcaggcccgacgttacggtgaatttaaatcgtgcggcgggcaaactctttcaggcgaaagccgagcagcagcaatgtcgcgaaataggcgactacgccggcgaccactactaccatcagacgcatcaggcggaacggcatcgtcccctgcgaccattccggcatcagatacatcacgccgacgagcgctgcggccatgaccagcaccgcgatgaccagacgcagcaggaagacgaaccagcccggctgcggcgtgaagattttctgcttacgcagttgccagtaaagcagcgcggcgttcagacaggcagccagaccaatagacagcgacaagccggcatgcttcaacgggccaataaacgccaggttcatcacctgggtcattatcagagtaacaatggcgattttaaccggcgtcttgatatcctggcgcgagtaaaagcccggcgcaagcaccttcacgacgataagccccatcagtccaaccgaataagccaccagagcgcgttgcgtcatcgccgcatcgaaagcgttaaacttaccgtactggaatagcgataccgtcagcggtttggcgagaatgcctaaggcaaccgcgcttggcaaggccagcaggaagcacagacgcagcccccaatccatcagtcggcagtactcatcgtgattgccgctggcgaaactttttgataacgatggcaacaggatggtgcccagcgccacgcccagcacgccggaggggaactccatcagacggtcggcataatacatccaggagaccgaacctgaaaccaggaaggaagcgaaaatggtattgataatcagcgagatctggctaacagagacgccgaggatcgccggccccatctgcttaaccacgcgaatcgcccctgcatctttcaggttaacccgcggcagcaccagcatacctatttttttcagatgcggcagttgatacgccagttgcaggataccgccaaccgtgaccgcccaggccatcgccagcattggcggatgaaaataaggcgcggcaaacagggcaaaaccaatcatgctgacgttgaggaaggtcggcgcgaaggcgggaaccgagaagcggttccaggtgttaaggatcgcccccaccagcgacgccagcgagatcaataaaatgtaggggaaggtgatgcgcagcagctgggtggttaaggcaaatttatctggcgtatcggcaaagcccggagcagtaacggtaatcacccacggcgcagccagcatccctgccaccgtgaccagcgccagaaccagcgtcaacagcccggaaacataggagacgaacacccgcgtcgcgtcttcgccctgcttgcttttatattcagcgaggatcggcacaaaggcctgagaaaaggcgccttcggcaaaaatacgccgcaagaggtttggcagtttgaaggccacaaaaaaggcgtcggtcgccatcccggcgccaaaaatacgcgcgacgatagcatcgcgggcgaaccccagtacgcgcgagaacatggtcatcgagctgactgccgctaatgattttaatagattcattactgtcttattccacaacccatggagtaaaacgcccgcaaaagcgggcgctggaaagtggcgatagtctaccgggttcgcaatgaattactactgtcagttgttacaaccagttattcgctcatcgcctcgcgccagagcttttccacgatccgctgggctaaaagcgcctgctcgccggcggtttccggaaccgtctgattttgcacgcattcgataaagtggcgagcgcagccgtcgaatccgcgctgttcaagtgtcgtttgccagccgggcgccgggcgctgcaggataccgctgccccgctcttcacgccactcgcgcatatcgcacacctcatacagtccgccatcggtcaccgcctgcacccactcacgctggcttcccgcgcgacgatgcatactggtggtgatctgcagttgccccgcgctgaagtgatgctcggcgtagagcatttccccttgagaagtggtttgcaggaccccgccgtccacccgcgttttatctcccgccagccacagcgcggtatcgacaacatgcagataatcatccagcagggtaaagcgcagctctttgcccacgctatcgctacggtgcttatccatgcgcaatgacgctgcgtcattgagatgcgctttcaattcacgatacaacggcgcaaagcggcgattgaagcccaccattaacgttaaacgccgacgtgccgccagttcaaccaatgattcggcttcgctgagcttgtccgccagcggtttatccacgcaaacatgaacgcctgcattcagcagatgatgaaccacttcataatgtgaagcggttgaggtatggacaaataccgcatcacattgcgccgccagcgcatccagagactcggcatagggcagacgccaggtttcgcagatgcgtaacgctttctcttttcctggcgaccaggcggcctgcagcgtccagccatcagcggcgcccagcaccggcagccatgccttttgcgcaatgccgccaagtccaaccacgccaacacgtaatttcgccgtcacggttactctcctaaatgagccagtagtgaatcaaggcgtactttgagctcagcgacttcactttccagcgcctcaacgcgcgcctgcaaatcgtcattcggcggcgacaccgcctcgaccacggtgatgagcgaatccatgtcatcacaaaacaggtgcatatagcggctttcgcgtttacccggttcgcgcggaaggcgcgcgacgtaaggaccgtcttcacgactggccaaattgtcgagcgtgctttccacctcggccatgtcgcggaattcatacatccgctgcgcgcggctacgcagctcgcctggcgtttgcgcaccgcgcagcagcagcgtcgtgacaatggcgacttccgccgccgttaatttgagatcgccaaattccgaattgcagaagcgctgttcatatttggtcacccggttgccaaaaccgcttaccgtacgcaggtagtggcgtttgaccagctcatccagcaaatcctggacgtcgctttccgccagcgacattaccggctcacggttggttttctggttacaggcggtaaccacagcattcactgatagcggatattgttccggcgtggtcacctgcttctccagcaggcaaccaatgatgcgcgcttcatgcgcggttagctgatatttcatgttgtctccttagcgccctggtgtccagtcagtggccgttaacgccgtcaatacgtggtctcgccattgcccatcaatgaggaggtagtcctttgcgtaaccctctttttcgaacccgagccgggcaagcagatcgccgctgcgtttgttatgcggcatataattggccatgatacggtgaatatgctgcgtacgttgcatatagcgaatcgccgcggtcagcgcttcaaacatcagcccctgcccttgccacttttcaccaatggaatagccgagataacaggcatgaaatgaaccacgcaccacatttgagaaattcgctacgccaataatctctttctcatcaggatcgagtagcgcgaaataaaaggccgaaccctgtttatgaaactccgtaatcatcgataatcgcgcctgccagccggaaggataacagtggctttcatcgcgcaccggctcccagggtttcaggaaccccttgttttccgcgtaataatcggccagacgccaggcgtcacgatcgtgaaccagccgcaccaccagccggtccgtcgtcaaacgcaccttgggtacgttactgcgatagccaaacattcctcactcctgttccctgccccaaactaatatctttcactataccttccctgagtgaaggtgggaaaacagcaacataccattttctgcaccatctccatttttcgatgaataggctcaatcgatcttgctttttgataaaaaaatattgtcgccagtatgctgggaaaataaccgccgcccccgcagaatatctaagcttatctttctttttccctggaggggaaatgtcccgcgtatcgcaggcaaggagcctgggtaaatatttcctgttagtcgataacatgctggttgtgctcggcttttttgtcgtattcccactgatatcgatccgttttgtcgaccaaatgggttgggcggcgctgatggtcggtatcgccctcggtctacgtcagctggtgcaacaaggtttaggcatcttcggtggggcgattgccgatcgtttcggcgccaaaccgatgatcgtcaccggcatgctgatgcgcgccggcggtttcgcggcgatggccgtcgcccatgagccctgggtgctctggctctcatgcattttgtctggtctcggcggcaccctgttcgacccgccgcgagcggcgctggtggtcaaactggtgcgcccgcatcaacgtggtcgtttcttctctatcctgatgatgcaggatagcgccggcgcggtcatcggtgccctgctcggcagttggctattacagtacgatttccgtctggtgtgcagcgcaggggcagcgctctttattgcctgtgccgcatttaacgcctggtatctgccggcatggaaactctcgacggtcaaaacaccgatccgcgaaggactggggctggtgttacgcgataagcgctttgtcacttacgtgttgaccctgaccggttactacatgctggccgtgcaggtgatgctcatgctgccgattatggttaacgatattgcgggctctccggcggcggtgaaatggatgtatgccatcgaggcgacaatctccctgacgctgctgtatcccatcgcccgctggagcgagaaacgttttcgtcttgagcatcgtctgatggcgggtttgctggtgatgacggcggcgatgctgccgattggcttaaccagcacgctacagcagctgtttaccttaatctgtattttctatatcggctcgatcattgccgaacctgcgcgcgaaacgctgggcgcttcactggctgatgcccgcgctcgcggcagctatatgggtttcagccgccttggtctggcatttggcggcgcgctggggtatgccggcggcggctggctgtttgatgcaggtaaagtgcttaatcaacctgaactaccgtggctgatgctgggcattatcggctttgcaactttcattgcgctatggtggcagtttagccagaaacggtcggcttccggcatgctggaaccgcgcacctgacaatcagccaaagtggtaatcctttttttcagcattttccgctagtacaagcggggctagcagaccatgctgctttgtgtcaggattagctatggcatgacgttaaggaacccaatgaaaaagatgttgatcgcggccgcgctgattgtcagcggccttctgagcggatgtaaccagcttacgcaatactccgttagcgagcaggagattaaccaggcgctgcagaaacgtaaccacttcgctaaagatatcggcctgcctggcgtagcggatgcgcacattgagctgcaaaacctgaccagcgccatcggtcgtgaagagccgaataaagtggcgctgagcggaaccgctaatctggatctgaattcgctgtttggcaatcagaaagcgaccatcgacctgaagctcaaagcgctgccggtgttcaataaagaacaaggcgcaatttatctgcgtgaaatggaagtcgtcgatgcgaaagttaagccggaaaagctcacctccgtggtacagacgctgatcccttatctgaatcagtcgctgcgcagctatttcaatcagcaaccagcctacgttctgcgtgaagatgccagcaccggtgaagccttagcgaagaaatacgctaaaggcattgaagtgaaaccgggcgagatcatcatccccttcactgattaaacaataagggcgctgaatatggcgcccttaattttttacggaaatgagtgcaaaggaaaacgtttacgcttatccttagtgcccggcaaaaaacagccctgatgactgaaccaattagccggagccttccatgacagcacaaccccaggtattgaaaatccgccgccctgacgactggcatatccatctacgcgatgatgatatgttgcaaaccgtcgtgccttacaccagtgagttttatggccgggcgatcgtgatgccgaatctggtaccgccggtaacgaccgtcgctgctgccattgcttaccgccagcgcatcatcgatgcgattcccgccgggcatgatttcactccgctgatgacctgctacctgaccgacacgctcgatccggacgaactggagcgcggattccgtgaaggcgtatttaccgcagccaaactctacccggcaaacgccaccaccaactccagtcacggcgtgaccagcaccgatgccattatgccggtgctggaacggatggaaaaactgggcatgccgctactggtacacggcgaagttacccatgctgatatcgatatcttcgatcgcgaagcgcgctttattgagacggtgatggaaccgctgcgcaaacggctgcaggggttaaaagtggtcttcgaacatatcaccaccaaagatgccgctgaatacgtgcgcgacggcaacgaactgctggccgccaccatcacgccgcagcatctgatgtttaaccgcaaccatatgctggttggcggtattcgcccacatctatattgcctgccgatcctcaagcgcaatatccaccagcaggcgctgcgtgaactggtcgccagcgggttcagtcgcgcgttcctcggcaccgactccgctccgcatgcacgccaccgtaaagaggccagttgcggctgtgcgggctgtttcaatgccccgaccgcgcttggtagttacgccaccgtctttgaagagatgaatgcgctggaacattttgaggctttctgctcgttgaatggcccgcgtttctacggcctgccggtgaatgaaagctacgttgaactggtacgcgaagagagtactgtcgccgaaagcatcgcccttcctggcgatacgctgataccgttcctggccggcgaaaccgtgcgctggacgatgaaaaaataaagttttttgccccctgttgtaaatgtgcaagcgttactgtataaataaccagtacattacccagggggccattatgcgcatcgaagtgtcaattgccaaaaccacagccttacccaacggcgcgctggaagcgctgaataacgaactcgctaagcgtatcgctcactattaccctgaacgtgaaaaccaggtcacggtacgttatgccgccggcaataatttatctgtcatcggtggcctgaaagaagacaaagaccggattagcgaaatcctgcaggaaacctgggaaagcgccgacgactggtttatccacgactaagcctccgggtctgcttacacaaaatcaatttgctccctcattgtgcttttttttgccgggtcgccccggcttttttatctccgcttataactaagactttccttaataccctgataaattccttaaaaaataatgagacccaggacgaaactcgcgcaaaaaaccgccaatcagcgcaaaatttgtcgctatttatttattttctcgagtttgtacttaactgctgatataattaacctgcttcagaaaacaagcattaaacctcgagaattgttgtcttttaacatatgaataaggggttatgatggaaaagaataatgaagtcatccagacccatcccctcgtcggatgggacatcagcaccgttgatagctacgatgcgctgatgttgcgcctgcactaccaaaaccccacccaagaaagcgataaagaagcagaaattggccagacgctatggctaacgacggacgtcgcacgtcagtttatttctattctggaagcaggaatagcgaagatagaatctggcgattaccaggcaaatgagtatcgcagacattagcatcaccgatgatgtctaaatattcactgaacaggcacctgcgggtgcctgaattatttttcgcgcttgtacatccggcagatgttaattaccctgctaataaaacaataacccggaactcaccatgcaatacgacctcatcattatcggtagcggctccgttggcgctgccgctggctattacgcccgccgcgccggtctgaatgtcctgatgaccgatgcccacaaaccgccgcatcaggaaggcagccaccatggcaacacgcgtctgattcgtcacgcttatggcgagggcgaaaaatacgtaccgttggtgctacgtgcccagcagctatgggacgaattcgcgcaagacagcggcgaggccgtattcgaaaaaaccggcgtcattaacctgggcccgaccagctccgattttctcaataacgtggcccacagcgcgcgtcagtttaagcttaacgtagaggaactggacgctgaagctgtcatgaagcgttggccggagattcgtatcccacaagattatcgggcaatttttgagccggcttccggtgtattacgcagcgaactggcggttgaaacctggatccggctggcgcgtgaggcgggttgtgcccagctcttcaactgtccggtgaccgcgatccatcatcatgccgatggcgtgaccatcgataccgctgacggcagttacaatggcaaaaaactgctgatcagcgccggaacctgggtaacgaaattattgccggaactgcccattcaaccggtacgtaaagtcttcgcctggttccaggccgatggtcgctatagcacgaaaaataacttccctgctttcaccggcgaactaccgaatggcgatcagtattatggcttcccggcggaagacaacgaattgaagatcggcaaacacaatggcggccagctgatttccgaaccgggcgagcggaaaccgtttggcgctgtcgccagcgatgggtctgagtcgttcaacttcctgcgcaacgtgctgcccggaattggcggctgcctgcacggcgcctcctgtacgtacgataatacggtagatgaagatttcatcattgatacgcttcccggtcacgacaacacattactcattaccggtttaagcggccacggtttcaaatttgccccggtacttggcgaaattgcgacgcaatttgcgcaaggtgaaacgacggagtttgatttgactcccttctcgctggcgcgattttcacaataatagccagccataaaacgaaacggcctcaatggaggccgtttattgattgagaacgtttatgcgtcgcctgtatcactggttagtcaacaatgtgcgcgagcactttatgatttatctcgcgctgtggctgctgctagcagtaatcgacctcatctggttatggttttactgacgggtcgggatccgggatacctaatttggtattaagacgaccacgggatttattaaaaatcttattgccattctctcgccccgcccgcagtttgcgctgctcctcttccggcagtttatgctcttccatacaggcttcgctgcagcaaccggcaaatttctcggcacaagccggacactgaataaacagcaaatggcagccgtcgttcaggcaattggtgtggctgtcgcatggtgcgccgcattgatggcagtgggcaatcacatcatcagaaatacgctcgcccattctttcgtcaaagacaaagttcttaccgataaagcgtaccggcaatccctgttcacgggcgcggcgcgcatactcgataatcccgccttcgatgtgccataccttattgaaaccgctatgcttcatccaggcgctggctttctcacagcgaataccgccggtacagtacatgacaatcttcttgtctttgtactcctgcatcatctcaaccgctttcggcaattgatcgcggaaggtatccgccggaatttccatcgcgttctcaaaatgaccgacttcgtactcataatggttacgcatatcgatgaataccgcgtccggatcgtccagcatcgcgttcacttccgccgctttcagatactcgcccacatcagagggatcaaaggttgggtcatcaataccgtcggccacaatgcggtcgcggaccttgaggcgcaggacccaaaaggatttaccgtcatcatccagcgcgatgttcagacgtaacccctttagcgccggatcgaagctatcgagaaattcacgcagcgctgcgaccttgctttccggcacgctgatctgcgcattgataccttcatgggccagatagatgcggccaaagacgttcagcttagtcaacgccagccacagagcgtcgcgggtcgctttcgggtcaacgatagtgaaatatttatagaacgagatcgtcgtgcgcggctcggtctcagccagcatctgcgcctttaacgtctcatttgaaatgcggttgtgtaacactggcatggtgtacctgctcgacataggaaatgagtaaaataaacggcgggcatcatatagcaaacaccgttaatttacatccctacattttacgctacatttcatccacgcggttttcagccgttaacaatcggcttcagccggagactgcttttggcggtagcggaaaaaaatgcgataatagaacgcgttgtttaatcagacaggtatgaaatgacccatttaccgaaattttccgccgcgctgctccacccgcgctactggctgctttggctgggcataggcctgttgtggttagttgtccaactcccttatccggttatctaccgtctcggtaatgccattggtcgtctggcgatgcgttttatgaaacgccgcgcaaaaatcgcttatcgtaatcttgagctctgctttcctgagaagagcgaacaagagcgtcatcaactggtagtacaaaactttgagtccgtcggcatgggcctgatggaaaccgggatggcatggttctggccaacccgacgcattgcgcgctggacagacaccatcggctttgaacatgtccgcgacgtgcaggcacaaaaccgcggtatcctgctgattggcattcatttcctgacgctggaaatgggtgcgcgcatgtttggcatgaaccaacccggtatcggcgtctatcgcccgaatgacaacccggttatcgactggctgcagacctggggccgcctgcgttccaacaaagatatgattgaccgtaaagatctcaaaggcatgatccgcgcgctgaaaaaaggcgaagtggtctggtatgccccggaccatgactacggcccgaccgccagcgtcttcgcccccctgttcgccgtcgagcaggccgccaccacttccgggacctggatgctggcgaaaatgtctaaagcgtgcattgtgccattcgtcccacggcgcaaaccgaatggcaaaggctatgagctcatcatgctgccgccggaatgcgatccgcctctggaaaacgcagaaaccaccgccgcgtggatgaacaaaatcgtcgaacagtgcattttgatggcgccagagcaatatatgtggctgcatcgccgctttaaaacccgtccggaaggcgtgccttcgcgctactgattgactcactatccgggcggttctctgcccggataaattctaccgccagtcctcttaaatactcctttagctttaaaagctatgctccattgcgacaaccatttctcaggcgcataattagcaggctcatattttcctttattttgacccgcgccgcgggccagtgagaccttatgtcgtctgctgatacacctattaactggaaacgaaatcttaccgtcacctggcttggctgctttttaaccggcgccgcctttagcctcgttatgccttttttgccgctctacgtcgaacagttgggcgtcaccggccatagcgcgctgaatatgtggtcagggctggtctttagcataaccttcctcttttccgccgttgcctcgccgttctggggcggattagccgaccgtaaagggcgtaagattatgttgctgcgttcggcgctggggatggctatcgtcatgatgctgatgggcatggcgcagaacatttggcaattcctgatcctgcgcgcgttgctgggtttactgggcgggtttattcccaatgccaatgcgctgatcgccatccagatcccccgtcagaaaagcggctgggcgctaggaacgctttcaaccggcgcggtaagcggcgccctgctcggcccgctggctggcggtttccttgccgaccactgggggttgcgcaccgtcttctttatgaccgccacggtgctgtttatctgcttcctgttcaccctgtttttaatccgcgaaaactttgttccggtgaacaaaaaagagatgctcaatgccagggacgttttcggttcgcttaagaatcctaaactggtgctgagcttgttcgtcacctcattgattatccaggtcgctaccggctccattgcgccgatcctgacgctctacgtgcgcgacctggcaggtaacgtcagtaatatcgcctttattagcggcatgattgcttccgtacccggcattgccgccctattgagcgcgccacgtttaggcaagctcggcgatcgcattggaccggaaaagattctgatagttgctctggttatctccgtgctattactgatcccgatgtcattcgttcagacgccgctgcagctaggcattctgcgctttttgcttggtgccgccgacggcgcgctgttacccgccgtacaaaccctgctggtgtacaactccaccagccagatttcgggacgtatcttcagctataaccagtcgtttcgcgatatcggcaacgtcaccggcccgttaatcggcgcctcggtctcggccaactacggcttccgcgccgtgttcctcgtcaccgcctgcgtcgtcctgtttaacgctttttactcgaccatcagtctgcgccgcccacggcacgacgcttcagcggatgacgggggctcgggtaaacgttcggtaaattaagcgcttcagcgcttctctgccttgacgccagactaaccgccttctatagattgaaacgtgttcctttttcattcttcttagggggttagctatgtcaacggaatcagttttctacgccacgctcgaagaggccatcgacgccgcccgggaagagtttttggccgataatcccgacagcgatgaagaaactgccaacatcgaacagttcaatatgcagaagtatattctccaggatggcgatatcgcctggcgggctgaattcttcgccagcgaagatgaagaagtcgagtgcctggccatgctcagtggcgaagcggcacagagcgtatttgacggcgattatgacgaaatcgagctacgccaggaatgggtggaagaaaatacgctacacgaatgggatgaaggcgagtttcagctggagccttccctggataccgaagaggggcagaccgcagccgatgagtgggacgagcgttaattactcataggggccgtggctggcgtctagcggtagcaacagcgtatcaaataccagcgagaatggcagatcgagaatggtcagatagcgccaggctgaatcacgaacatcccactgtacgccggggtaatattggttgccatggccctgccccggtaccgtacggctaataatgctgccgcagccgctgagtaccagcgtcatggcgataagcacaaatattctcattcacttcctctcaggcaaaaaaataccggcacaattgccggtattttccttaacgtacggcttacttcgttttcaacgccagcgggttcagcgtgagctgctgatacgcccccacccaggaggagtatttctccggggcgttccacacgcgatagtgcagacgcgacatcgttaccggatcgcttaacagcaccagccgacgatcgcggttgagtttatcaggcgtttcattcagcgcctgctcaacgtggcgttcacgggcgatatccagaatatgaccgtggcggtgacgcgccgtagccattgccgtcgccagagcattgaacgatgggttaaacaccgcgtgcataaagccatcgcccagcgaacgctgacggttcaaagtcaggtaagcatcggtatctttcagtacctgcggcggcgaatactcttccgggatcaggaacaatttccagcgtttagtgcgcagacctaccgtcgcgcggctggaaatcgccgagacaaacggagagaggatcagcgacacgacgataggcgccagccagaacaggaaacgcagatccagccacgccatgccaaccgcccataccagccccagcagcagctgcgaaccgtgacgcataaaggcctcgccccacggtgttgagtcatcatcgcgctgcggtgagttccacaccacctcccaaccgaggaacgcgctgaccacgaacacggtatggaacagcatgcgcaccggagccagcagcaccgagaacagtacctccagcaacagggagagcgtcacgcggaagaagccgccgtactctttcggccctttgcaccacaccagaatgatactcagcagttttggcaggaacagcagcaccatggtcgaagcaaacagcgcgatagccagttccggacgccactgtggccataccgggaacagctgacgcggctgcaggaagtattgcggctcggtcagagcgtgcacgacctgtagcgccgtcgacagcgcgaggaacataaaccacagcggcgccgacagataggacatgacgccggtcaggaacaccgcacggtgtaccgggtgcatccctttcaccaggaacaggcggaagttcatcaggttaccctgacaccagcggcggtcacgcttcagttcatccagcaggttcggcggcagctcttcataggagccaggcagatcgtaggcgatccaaacgccccaccccgcacggcgcatcagcgcagcttccacgaagtcatgcgaaagaatcgagccggcaaagttaccttcgcccggcagcggcgccagcgcgcagtgttcgatgaacggcttcacgcggataatggcgttgtgaccccagtagtgcgattcacctaactgccagaagtgcagcccggcggtaaacagcgggccgtacacgcgggtggcgaactgctggcagcgcgcataaagggtatccataccggaagcgcgcggcgaagactggatgatcccggcattcggattcgcttccatcaggcgcaccagcccgctcaggcactcgccggtcatcactgagtcagcgtcgagcaccaccatgtagctatactggctaccccagcgacggcagaaatcatcgatgttgccgcttttacgcttcacgcgacgacgacggcgacgatagaagatctggccttcaccctgcacttctgcaatcaattccatccacgctttttgctcggcaacgcaaatatccgggtcgtagctgtcgctgagcacgtaaacgtcaaaatgcgcagcgttacccgtcgctttaaccgattcccaggtggcgcgcaggccggcaaacacgcggtcaacatcttcattacagataggcatgataagcgctgtacggtgttccgggttcagcggctcgtcgccaacggtggatgccgaaatactgtacttatcacgcccgatcagcaattgcaggaagcccatcagcgcggtccagaaaccggccgagacccaacagaaaagtaccgcaaagaggatcaggatgccggtctgcaacacgtaagggagtagctgcatgaaggagacccacagatcctggccaaccatatcggatggattgatcaacgcccatccctgataagggaggatggtcttcatataccaggtggccactaccgtttgcgccagcgtcagcagcagcaaaatgtagcgacgaatggtgccgacggtacgccatttctgttcactttcacgctcttcttgcgtgaggcgagagagatagcgcggagtcacgtcacggccacgcaggcgatcccagaagcggcctaccgggttggtgcgccacgggtcggggatcatcgaggaacgtttcgctttcggcatcgcatgaagctgcgtgcgcccttcatcatctttcaccagctgatcgccagccagagagtctggccagctatgctccagccgcgctttaaccgatcctaacggggaatcttcatcgcgcggaaaatgatgatgctctgcgtcaagcgcttcatgtacggcttgcaggctcgcatcaggtaatgcggccttttcagcatccgacagcggcaatgcgtcgatataattcgttatcttattcattggcaggcagctgatagctccaggtttcgctcagcgtctgatcgccattgaccagcgccgcacgcatttccgtggttttcttcggatctttcactttcacgcgcagggtcatacgccaacctttgataaccgggttatagcgcacggagttttccacgatttcggcattatcgccgatgctcgcctgcgccgttaccggcgtgtccgccgccatttttttcatgtcagcgccggtgaaatcaacgatgaaagcgatagtgccatctggctggcgaatgaggttagactgcttcacatcaccggttgagcggcgagtctgcaccacataagcgctatctggcgcatgcagcttgtcttcatcgcggctgaaggtaatggagtatttgaagttcatctctttgcccggttctggcagctgatccggggtccagtaggtgacgatattgtcgttggtttcatcgttggtcggaatttcaaccagttcgactttacctttaccccagtcgcctttcggggtgatccacgcgctcgggcgctggtcgtaacgatcgtcgagatcttcaaagcgggagaactggcggccacgctgcagcaggccaaacccttgcgggttctccatcgcataactgctgacggccaggtgtttcgggttattcagcggacgccagatccactcgccgttaccggcaagaatcgacagaccgttggagtcatgtagttccggacgatagttagtcgtcggcgacggttggttcggcccaaacaggaacatactggtcaacggtgccacgccgagtttaccgactttgtcacgcagatagaccttcgactgcacatcaaccacggtgtcgcgcccaggcataaccacaaaacgataggcgccggtcgcacgcggggaatccaacagcgcatagatagttaagcgcttatcggtcgctttcgggcgctcaatccagaactcgcggaaacgaggaaactcttcacctgacggcagcgcggtatcgatagccaggccgcgggcggaaagcccgtatacctgaccctggccaagaacgcggaagtagctggctccgagcatgctgacgatttcgtcattcttgtctttgctattgatcggatacagtactttaaaaccggcgaaaccaaggtctttcaccgtgtctttatcgtgttgcacattgccaaaattaaaataatccgggctatatttaattttacgtacgctggtgctggtcacttcattaatagtaaccggcgtgtcgaaatacatgccctggtggtaaaattccagcttgaacggggttttcaggttattccagtacgctttgtcgtgattgaactggatttgctggtaatccgcgtatttcatatcgcggaaggcggagggcaggttacttttcggcgcttcatagcctttcccggctaacgttttcgcctgttttgctacgtcatcaatgctgaatgcccatgcagatgaagtacacagggacaacattacggctgcgcttaaccaacgcattttcatcatctgtggtttatgtttcatagtaagtaagcacttccccctttgtgtgcttaaatcgatccgatctattttaatggaaactcaggcaatccgacaacataatccctgcattgttcagcttagcggaccagggaataaacagttctctgtcccatattgcactttgcgtacttatcctggagacagataccctgagttcatgtagggttgctgggaatgtaaccgttatcgccgcgagtgataagacgaattgtctgagattgttgtgaatttatgaataaaacaccagtagagcgtgaatatttcttcgacagcatccgcgcctggctgatgctgctggggataccctttcacatttcgcttatctactccagccacagctggcatgtgaatagcctggaaccctcctgggggttaacgctgttcaacgactttatccatgctttccgcatgcaggtcttctttgttatttccggctacttctcttacatgctgtttttacgctatcccctaaagaaatggtggaaagtacgcgtagagcgcgttggcattccgatgctcaccgcgattccacttctgactttgccgcagttcttgatgctgcaatacgtcaatggtaaagcgcaaaactggcacacgctctccggctatgacaaattcaacaccctggcatgggagcttatctctcatctgtggttcctgctggtgctggtcgtgctgaccactctcggcgtggtgctgtttaagtggctggccaatcgagggaaaacgcagaccgccagctttggtgacactgtcacatttggtcaattatcgcttattttccttggacttggcgtgttgtatgcggtaattcgtcgcactatttttatcgtttacccgccgattctcagcaacggactgtttaacttcatcgttatgcagaccctgttctatctgccgttctttgttctcggcgcgcagacgttcatcaacccgcggctaaaagcgatgttcaccacctcatcaccctggtgttttgtcggcgcactgctgggctttatcgcctatcgtcttaaccagcagtatggttccggcgatggctggatgtatgaaaccgaatcggtgattaccatggtgctggggctgtggatggtgaacgtggtattctcgctgggccaccgcctgctcaacttccagtccgctcgggtgacttacttcgtcaacgcctcgctgtttatctacctggtgcatcatcccctcaccctgctgtacggggcgtggattacgccaataatcaaatcgaatctgttaggttttatcaccgggctggtgtttgtggtgggtattgcgctggtgctgtacgaaatccatctacgtattccgctgctgcgcttcctgttctcaggcaaaccgcagcaaaaaccggcgaaagcgccggtgtcggttaactaaaatccgcaaccggcagcgcgcctgcgtgctgccggtgccgcgattcattctgcctgcaataatcgctgatagatctccgccgtttcgttatcaaagcagacgaagcacactcgttccagtggattatatcgggtgaggaaagccttcaccgttttcaccgcaatttccgccgccgcctgtttcggatagccatatacgccggtgctgatagccggaaaagcaatagatcgataattattggctgccgccagcaacagactattgcgataggcatccgtcagtaattcggcctcttgctcgtcaccgccgcgccagacggggccgactgcatgaatcaccgcgctggccggtagattaccggcgctggtgataaccgcatgcccgggcggacattcgccctgctgctgacggactattttgcaggccgccagtagttccgggcccgctgcgcgatgaatggcgccatcaacgccgccgccgcccagtaacgatgggttggccgcgttgacaataacatctacctgcaacgtcgtaatatcgccgagaaccacctcaggttgaacaaccatttccccctcctgtcggcaaacgtcttcatacttagcgtggtgtctactatggcatgatagcccccaaggcggaagcctgaggggcagtaattagcgataattcacttctaggatagcgcgggtatgttgcggatcaatatactttaattgtgctgagcggacggcgtcattgctgtaatttcccgtcgtcagcacctgcggcgaaagcgcccgggtaggcagctgcgggcaggccatttcaatcttttcgcccacactattggcttcacaggacggatcgacgacctgcccataaatggcgacaacgccgtcggtcggcgcggcgtgcactgccccagacaagcacgacaacatcagacatggcatcgctaaggcgtggattttttttatcacggcagtctcccctgtttaatagcaaagaagcaacaggccatccatgagcgcactgcgccgccagaatacggcaaggcaatgattgcgttatgaaatacaaatatattactttttgttttctttttgctaacaaaatcgattcatcttgattttgctacaaaaaagcggcgtgagaatgtcaggagcgaggcgcggcgaaagcccccgctggatctgcgggggccttgctattaccgataactcacttcgagaatagcgttggtgtgctggggattgataaaggtgaactgtgttgatttgatattggcatgttgcagatctccccgggctacctgctgggcagaaaaagtgactgacttctgcttagcgcaagccatcgagacctgatcttctgaagaacgaattttacaaggcggttcgacaacgccgccgtggaaacgaatcacgccgcttgcggcgttagaggtagttgaaaaagtcaataaagcgggaaggaaacaaactgtagcaagtagtacgccagtcatttttttcacggcaaaacccctctgcgtaacggtcaaaaaaaccttacaaatcatccatgagcgcagttgaatacaagcaactacatacaaaatcagtatatatatgaagtacccgttgatacttttttctctccgtttttgcaaacggtatcaaattattatggtttgtttgctcaaaatgtctgcattaagaggaaaaaacaatcgaagaggggttgatgcgaaaaggctttcatgtagtgagtgacgggaagcttactcccgtcgtcgaggaaatgtgaagaaaatcagacgttatcgttagccagagacttattctttgccgctcgcgccgccagccacagtccgctgtttttcatggcatagccaaagaccaatcccagcgccagtgatggcacgacaatgcgccagtcgccgctcgcggcaaaggtcgcgcaggcgccgataaaggttccgggaacaaaagagagcagcagctgacgcgcctgaatacacatcaggaaggcgactattccggtcatcacatagctgaggatttccagctgcggcgccagcgcgctaccgtaaataatcaccagcgcccatatcacgccgctcatgaccgtgcaggcggaaatcaacagccctttcaggccgccctgtgggcaagcgaaataggccgtacagccgaggaaaccggcccagctcagcaggccaagtgagaccgccacccatccccaaataccggagagaatgcccgtcgtgagtgcgattgcgaagagtatgttcatgccgcgtatcatagcagatacgcggcaaccaaatgcgatccagaacacacaatatgaatgcgtgagtttgctgtttcacactaaaagtgacttacatcacaattattcgtcgttttcttcctgcagctcatcccacatggcggataaagcttcacgcgtgagtagcgccatggtacgccagaatgcggtttgcgcatgcgcctcgactttaccgaggaaggtgccgcaccacggtaagaggtaatcggcaaacaacgtttccaacgtttcgctttcgtcatctgaggcatgatcttcaagccaggatgcggccagcagtagggatccaatatgatcggttggcccatcgccagtgggaataccgtgttgagtaagaaaaccgcggatttccgcttccgtggcgccttcaacccacgcgctgcgataaggcgagaccgcacattcgtcaccaacgaaaagggcgttgtaatcagcggttaacggctgggtatcacaactcttctgcagacgctccagtaattcatcctgttccagcggccaactggcggccagcttgccatcgcgaatcagcgtgaacagcggcaccaacagcgggtcctgcggctgacgatagtacagcgagcccagcacgcgacagaggattgaaaattcattcatacaatatgttccagtggttcaaattaaaggtctgcaaattccgcaatcgccggcattccgcgtgattcgaggaaattcagtagtcgacgcggactgacgttaaggatccgctcttccgggaaattcaccgcgtcgaggattttgcgacattcggtaaattcgccaagcgtaaaggcggtatgggagtccgaacccagcgccacccaaccacccgcatcacgcacggcggcggcgattgcccggcaattatcttcactaccgatacgcgatgaaaggaaagaggaattattaatttccagcgccacatgatgctttgccgctgcttcggctactgccggaatatcgatcgggaatttcggattgcctggatggctaatcatgtggactgcgccactggcaatcgcggcaatcatcgcttcagtgtgggtggctttatcctgaggcgggaataccggctcatgaaaaccggcaataatcagatccagcgaagtcagcattggtccggtacagtcaatttcaccctgggtatttttaatattcgcttcaatgccgcgcaggatgccgacgccatctaccagacgcggccagatacgcatattgacgaaatgccagtagtgcggggcatcggccatatccgggccgtgatcggtgatggcaaaaagtttaatgcctttacgtttggcctcggcaatatagtcatgcagggtgctataggcgtgggtgctggcgacggtatgcatgtgcaggtcaacaggatacatcacaatctcctcctctgtttgtggcaagaatagcaggaatcaggagtcatgatcagtaaaaaccccgccgtagcggggttatcgattagtagccgcgttggcgatcgacctgcccgctgaccgtttcaccacgctccaggcggctaatggtactggcaatataagcgatcgcttcctgtggacgggtaacggcggcaatatgcggcgtcatggccacacgcggatgcgcccacagcgggctctctttcggcagcggttcgcggctaaagacatccagcatcgcccctttcaccttaccgctgtcaagcgcggccagtaaatccggctcaacgatatgtacgccgcgggcgaggttcagaacatagctgttatccggaagttgagagagtaaagtttcattaatgatgccgacggtttcgccgtatttggcaacaggttgatcagcacgcgggtttgccgtaaaaatgcgcccagttcttcctgaccggcaaaactctcaacttgcggccaggatttgtggctacggctccagcagcgcactgggaaaccccagcgcaacaggctttccgcgactttgccgcccaacacccctgcccccataatgccgatagtaaaatcttcgcgacggtattccggcaacggctgccagtgggattgcagcttcagcgcctgataatcatcaaagcggcggaaccagtgcagtacctggcttaccgcatattcctgcatctgcaggcccataccggtatcttcgaggcggaacagcgggatcgaaagcggcagcatatcggatgctcccgcagcttgctaagaatagaatccacgcctgcgccgagggcaaaaaccgccttcaatttgcggccttgcaacatttctaccggtggatgccagaccagcgcatagtcggctggttgattgtcgccaggtttccactcacgaactcgcgctcccggcagatgtttttccagctctgcgatccagtagggggtatcgaacgtcgggtggtaaaaaataatctccataatgactcctgattactgacgcgtgcgtaggttgaggtttgcgtcgtgttttactctttgttttgtattggtttgccagcataacaaatttcgtatcgctatcgaggaataaagagaatggtgacaaaaaaaacgattcccgcgcgtttaagaagcaagttgtttgaagttggctaaacgcatctttttttaaaaaagttgattgacgggagatacgtatttccctacattagcgcccgttcccagcaacaacgggaaagacaatatggtgagtgtcgagtcgctgaaggagcacgcctggaaagtgtgtaaacggcaacgtatcgggggttcgaatccccccctcaccgccatattcgagatgagagctcgtacgaaagtacgggctcttttcgcatctggcccctgtaaactttcccggggtcggcataaatgcctcgcccgggctacccatcccgcaggccgcaccaccagccagtagcccgtccaggcgcagcgccgccgggaaaaagagcctgggctaatcctcttccatccgttgatactcttcgctgagataatccaccagcgctctgacagaaggtaataaaccgcgccgcgaagcaaacaccgcatgaatgacttcccgccgcggctgccactcatcaagcacgatttccaactcccctgatgccaactgatcgcgcaccattaataaaggaagttgaaccacgccaacgcccgccatggccgcctcgcgcagcgccagcatatcgctggtcaccatccgcggcgtgaaataaacctcggcccgcgccccctctggcccggtaagttgccatttatgctgatgttttccggcgccaatacttagtcccggccaggtgctcaattccgccggcgcctgcgggcgcccaagcctggctatcagcgccggactcgccaccaggcgatggccgcgatcggccaacacccgcatgaccaggtcgctatcttcaaatggccttggtcgcacgcgaatggccacatcaaccccctcgcccaccacatccacccgccgattggtggcttccagatgtagcgtcaccccaggatatcgcaccataaagcgcgccagcatcgggccaacatgggcatgcaacagggttaccggacaggtgagcttgacgctgccgcgcggttcagactgcagcgtttctaccgcctgatgcgccgcttcggcttctatcaacatcgccttgcagtgttgatagaaagtttggccgacttccgtgacggcgaactgtcgggtggttcgttgaatcagacgtacgcccaggcgctcttccagttgcgcaatgcggcggctgagtttggatttgggctggtcgagcgcccgaccggcagcggcaaaaccgccatggtcgaccacctgaacaaaccaggccaggtcgttgagatcctgcatccttttctccatcgttccatttttagaacagtataggtcattttcgctatctaccggaatattagccccagatataagcttattcacatcagatacagacacgcaggagataaccatgaaacagattactggcgtttacaccgccccttcgcagcactgggtgggcgacggtttcccggttcgctcaatgttttcttaccagacccacggcgaacaattgagcccgttcttactgcttgactacgccggcccgcacacgtttccggcgggaagcggtaaacgcggcgtcggcgagcatccgcatcgcggattcgaaaccgtcaccattgtctactctggtgaagtcgagcatcgcgactcaaccggtagaggcggcgttatcggccctggcgacgtgcagtggatgacggctggcgccgggatcctgcatgaagagttccactccgaagcgttcacccgctccggcggtgaactgaaaatgatgcagctgtgggtcaacctgccggcgaaagacaaaatgacgaccccgggctatcagagcattaccgcagacgtcattccgcaagcaacgctggaagacgacgccgggaccgtcagagtgattgccgggcgttacggcgatgtcgccggcccagcgcacacattctcaccgttaaacgtgtgggatatgcagctcaaacaaagtcacgatgtgacattgcatcagccggaaggctggagcaccgcgttggtcgtactggaaggtgaagtcaccgttaacggtacggaaaacgcccgggaaggacagctggtggtgctgagccagaaaggcgaagccttccatctggaagcgggctccgacgcgaaagttctgctgatggccggcgagccgctgcaggagccgatcgtgggctacggcccgtttgtgatgaataccaaaacgcaaattgccgaggcaattcgcgattttaacagcggccgttttggccaaatctaacgaaattgaggtgaagaatatgtctactccagctaactttaacggttctcgtccggtgattgatgttaacgataccgcgatgctgttgattgaccaccaaagcggcctgttccagaccgttggcgatatgccgatgccagaactgcgcgctcgcgccgccgcgctggcgaaaatggcatcccttgccgggatcccggtgatcaccaccgcttccgtgccgcagggtccgaacggcccgttgattccggaaattcatgagaatgcgccgcatgcgaagtatattgcgcgtaaaggcgagatcaacgcctgggacaacccggagtttgtcgccgcggtgaaagcgaccggacgtaaaaccttaatcatcgccggtaccattaccagcgtgtgcatggctttcccggcaattgccgccgtcgccgacggttataaagtgtttgccgttatcgatgcctccggtacctacagcaaaatggcgcaggagatcaccctggcgcgagtagtccaggccggcgtagtaccaatggataccgccgcggtagcctctgaactgcagcgcacctggaaccgtccggatgccgccgagtgggctgaggtgtataccaaagtcttcccggcgtatcagttgctgattgaaagctacagcaaggcgcaggacgtcgtgaagaacaacgaaaagctggattcccagcgttaaaatagctgccccgtcgatgaatcgacggggcagtgttcattgcttaaccgaacggtaaagaaagaaaaaaatatgcttgaccgttttagcgcaactccctatagtagcgccccgttgcccacccaaggtgagcagcaagacaatatggtgaggtgtccgagtggctgaaggagcacgcctggaaagtgtgtatacggcaacgtatcgggggttcgaatccccccctcaccgccatattcgagatgagagctcgtacgaaagtacgggctcttttcttttatattctccgtacaggggggatgagaacccccgaccggggttcgacaactggcgcagccagttggacagaccgcgaacgcagtaagcgggctgccccgcaggggcgagcgaagcgagtcaatccccccctcaccgccatattcgagatgagagctcgtacgaaagtacgggcttttttcttttatattctccgttgggggggatgagaacccccgactgggttcgacaactggcgcagccagttgggcagaccgcgaacgcagtaagcgggctgccccgacaaaaacgccgtgagcgtttttgaacaacgcctgcgttggccccgaaggggcgaggcccatggatgggccgagtaacggcgagcgaagcgagtcaatccccccctcaccgccatattcgagataagagctcgtacgaaagtacgggctcttttcgcatctggcccctgtaaactttcccggggtcggcataaatgcctcgcccgggctacccatcccacaggccgcaccatcaacaagtagcccgtccaggcgcagcgccgccgggaatcccacaggccgcaccaccagccagtagcccggccaagcgcagcgccgccgggaaacccgcaggccgcaccaccaacgagtagcccgtccaggcgcagcgccgccggggaaatgttgcaaaaacaacaaagcccgggacatcccgggctttgcacactcacaagcgtttagtaataggctttcaacgttcgctggcaaagcgttgaacgcacgcagtcatcggtggtaaaacgcacgatgccaatcatgtcgtcttcttcaaaacgcgacagcgcgtcactcaggcctgattttacgccagagggcaaatcacactgggtaatatcgccgttgacgatcaccgtgacgttctccccgaggcgggtcaaaaacatcttcatttgcgccgcggtcacgttctgggcctcgtccagaatcaccaccgcgttttcaaaggtgcgtccgcgcatataggcgaacggcgcgatttctaccttgccgatttccggacgcaggcagtattgcataaaggaagcgcccaaccgcttcaccagtacgtcatatactggtcggaaataaggagcgaacttttcggcgatatctcccggtaagaagccgagatcttcgtcggcctgcagaacgggacgggtaacaataattctgtccacatccttatggatcagggcttcagctgctttagccgcgctgatccaggtcttcccgcacccggcttcgccggtggcgaaaatcagctgtttattgtcgatggcattcaaataatgcgcctgagcttcattacgcgcttcaatcggcgaaagatcgcggctatcccgcgccatgccgattgcttctacgccactcatttgcacaagcgatgtgaccgattcttcttcacgttgtttatggctacgcgaatcccgtctcagcacacgttttgcctcacgacgagctttgatcactgctttttgtcttcccatggatagcaccttgcgttgttggtttacatcacgcgcgtcaagagcaacgcgattatgcgcacgaacgattgaggtttggcttccttgtaagccattgcttgccggttgaatggacaacgagccgcggctacgcgcaccgcgtaccctgccagagttagcctgattaatagtggaagagattggggttacagagtgaaaatcgctgccggaagctgggcctccgtgctggaaagtacggtatgtggttttacgttgtccgctacaggaccttaccattcgcgatctccatagtgagcgacatcactgccgggaactaccgcgtatgtaataagtacatcaaaaaatattcttaatgcaacttattttttacattgacgcaacaatgatttctcaatttactatagaaaactatccgtcatttgtattacagaaatataacacatggcaggaaatatattgaatccgagaaaaacagcagaaaacgccctgccttcgccggcaggacgcgtatcaggcttgcaaaagagattgtccaagataatgctggtcgttcatcacgccgggcaacacaaagaagtatccaccaccaatcggtttaacgtactcctccagggcctcgccgttcagccgtttctgcaccgtcaggaatcccttttccagatcgtgctgatagcaaacgaacaataaccccatatccagttgtccggagttggtgatccccaacgaatagctgtaaccgcggcgcatcatcaggctggattgcgtctcaggcgtacgcgggttcgcaagacgaatatggctatcaagggcgatcacttcaccattcggatcgcgactataatccggaacatcatgttcatgtttcatccccaacggcgcgccagaatgtttatcgcgaccaaaaatcgtctgctgctctttcagcggcgtacgatcccagaactcaacgtggaactgaatgatacgtgctgcctggtaactgccgccgatcgcccaggccggttcgccctggtcggcagtaacccacaccacgttatccattagcgctttatcctggctcgacgggttagcggtaccgtctttaaagcccagcaggttaattggcgtctctttgcctttgctacaggccgcgctatcagaaataaacccttcccgcttccagcgcacgctcagcagatcgggcgtgtgcttgataatgtcacgtagtgcgtgaatcaccgtatcctgggtattggcgcaaatctgcagtagcaaatcgccatggcacagtgcagcatccagcgaatcattcgggaaacgcgtcattgcctgcagttttttaggcgctttgtccgctaatccaaagcgctcatcgaacagcgaatggccgactgagacggtgatagtcaggttatccggcgcaatccacggccctaaaatcccggaatccatcggcggcaatcggggattcggggtatccggtgccggaccgcctgcggttaaaaaggcgatccgctgagtcagcaagcggaacaggcgttcgaggtcagctttatccgccgccagcacatcaaacgccaccagcatcatcgaggcctgctgtggcgtcaggatgcccgcctgatgcgggccataaaatggctgtttttcctgacgcgcatcgggggcgagcgtgccgggggagctttccgctttcgccgcctgcgccatcgggcaaccgccgctgatggccagcgcgccgccaagcgcgccgatccccttcagtaagcgacgacgtgacggttcattcacgtcgcgtggttttggttgtgtcatcgaattaatcctggcccaaaattccgcgtagttgagccagatcttctgccagcgtcgtgatcggccctttcagcgcattacggtcagcggtggtaagtttgtcataggtctcgaaaccgtctttcgtgcggtatttagcaaggatgacatcaacttttttgaagttggcgtcaactttggccagcagcgcgctattatccttttgcagctgcgggcgcagcaggtcgacgattttctgtgcgccgtcgatattggcctggaaatcccacaggtcggtatggctgtagcgatcttcttcaccgctaattttgctggccgccacttcttcaatcagccctgccgcgccgcccaccactttcgacggcgggaaggccagctcgctaatgcgtttttgcagttccagcacatcgctgttcaactgttcagcatagttttccatccctttaacgctgttatcgccaaacagcgctttttccagacggtggaagccggtaaatttcggatcttcggcttttttctcgaaatcgtcttcacgggcgtcaatgctgccgtcgaggtcagagaacagttcggcaatcggttcgatgcgctcgtagtgctgacgggtcggggcgtacagcgctttcgctttctcgatatcgccagcttttaccgcatcggtaaaggctttagtaccgctaaccagctgcgcggtttccgcggtgacgtaggctttatacgtagtaatcgcctcgccaagacttagcaccgcatcggctttcgctgcatctttgctggtttcaccggtgacaatcagctttcctttcggattagtcagcaggccacaggtcatatcgtattcgcccggctgtaggttagccgtcaatttttgcgtgaatcccggcgcgatattttcacgctcctcgaccaccattacccctttcaggatctcccactccagcgctttctggctgtggttctgaatgatgaactgggttttacccgccttcaccgtcacattcatcggctcgcactgcttgtcgttgacggtaacttttacttgcggaatatccgcagcctgagcgtagcatgcggaactgaacagcgcggcgacggttaactgcagcgcagtacggcgaaattgaattatcatggccatccctttcgaaaagtatgttgtaactatattaatcagcagcgcctgaattacgcggcccgcgatgctgtcgttttgctgcccggcggcaaagcaaaacacaccagcgccgggatcaaatagagaagataaaccgccacttcgctgacggtgggcgtctcctgataaccaaagatgccttccagcagcgtgccgaacagcgtatgcgtcgataccacgttgctaagatcaaaggcgacattctggaaataattccacagtcccgcctcatggaaggcgcgaatcgccccggctgccagaccggccgccaccagcaggataaacagactggtccatttgaagaacacgccgagattaaggcggacaccgccccagtaaagcaggaagcctaataccaccgccgtcgccaggccgagcattgcccccagcggcggccagatgcccacatcctgctggaatgccgccagcaggaaaaaaaccgactccaggccttcgcgggcaaccgcaaaaaacaccatcatcaccagcgcccagccgtggttattcccgcgctgcagcgcgttatccaccgcctgctccagctgttgtttgacgttgcgcgacactttacgcatccagaacaccatccaggtgagaataaataccgctatcaccgccacgatgccttcaaacagctcctgctcgcgctgcggaaattctccggtggtctcgttgataaaaacccctaacccgagacagagcgccgccgcgaggaatacgccaatccacatgacgccgatccagttgccgcgctgggttcgttttaaatagctggcaatcaggctgacaatcagcgcggcttccagcccttcgcgtaacatgatgagaaatggaacaaacatgccgaaacccttaaatgtgaaccgcagtcaacggatgcaaagataggtaaatatttctgatagtgattatcattacaacaatgagaaacacaagcgaaatgttcagggaatgatgactagttgtaaattaatcgctacaaaatagtcacttgcgaaaatacctcaccagctaagcattaaaatggcaaatagcatgattttttatgtcacatatttaccgggccggagcgctgtggctaaatggcggtcctgatttatctgcgaaataaataacatgactcaaattttgcacttcctgctggcgctggcagttattcttgccctcgcctggtttgccagctatgaccgacaaaaaatccgcattcgctacattctgcagttaattattattgaaatcgccctggctttctttttccttcacgccgaaagcggtttatgggtagtgaaaaatatttcaggattttttgcttcgttactcgggttcgccgctgaagggaccaatttcgtatttggcgggatgggtgaaaaggggctggcctttattttcctcggcgtactgtgtccgattgtctttatttccgcgctgataggtattctgcaacactggcgtattctgccgatctttattcgtctgatcggcaccctgctgtcgaaagtaaacggcatgggcaagctggaatcattcaatgccgtcagctcgctgatcctcggccagtcggaaaactttattgcttacaaaggcgtactcggggacctctcctcacgtcgtctgttcacgatggcagcaacagccatgtcaacggtatcactgtcgatcgtcggcgcgtatatgaccatgcttgatgcgaaatacgtggtggcggcgttgattcttaatatgttcagcacctttattgtgctgtcgattattaatcctacgcgccccggtagcgaagcagaaataaagctagagaagatgcatgaatcgcagagcttctttgaaatgctgggcgaatatatcctggcaggctttaaggtggcgatgattattctggcgatgctaatcggctttatcgccctgattagcgccgttaatgcgttatttgcgaccgtcttcggcttaagcttccagcaaatcctcggttacgtattttatccgctggcgtggctggtgggtattccattaagcgacgcgctaaatgccggtagtattatggctaccaagctggttgccaatgaattcgtggcgatgatcgagctgcagaaaattgccgccagcatgacgccgcgcgggctagggatcctttccgtgttcctcgtctcgtttgccaacttcgcctccattggcattattgccggggcgattaaagggcttaacgagcagcaaggcaataccgtttcccgcttcggcctgcgtctggtctatggcgcgacgctggtgagcctgctgtccgccagttttgccggactggtgctgtaactcatcgggcgggggagctccccgccctgcgtttcagaagtgtacgcagaccggctgatcaacgcgcataacggactcctgggcaaagcgcgtcttatacgtattacgcaacgcttcaatcccctgctcgcttttcgcatcgttgctatgaatcagcattagcgccttgctggattcgtgggcgactgcgccattgttgcctagccactggccgcgggcgtcaaataccgtcaggccatcgcgaaaacgcggcgtcacatcgcggtcgacaaactgctgccactcctgagcggtaatatctttccccgccgggcggctaaggccgaaatagagggtggtttgcatcatcctgttatccgcctgacagccgttattatcaacgtgcgcggcgcttttctcggatggcgccacgcatcctgccaatagtgcggcaacgatcagcgccgcagcgccctggggtaatttcatttgctatcctcattgtttttagtacccagatatcagcgtattttcagtgaattagcaagagatgcgcgaacatgactctctggcgatacggcagattttcttttgttctacactgataaacacaacctgggcgaaattcttttttaaattatttcctgcgttttttatttcaaagacttctctatagttgagcgtttttaactggcctggcggccgcgtaaaataacaactggaataattcatgatagaaaataatgagttagctaatattgagaaaagaattgtcacccgctttctcgatatgtttattaagttcggcttgatactggcgctggcctccttctgctttaccgtcttctcgccgttcctgaacatgatgctgtgggcgctgattctggccgtcacgctgtatcctttacatcagcacatcgcgcgacgtatcggcgggcgacaaggactggcatctaccatattagtgttattcggcctgctgattatcgtcatcccgaccattttcatggtgacctcgcttggcgaaagcgccggcagcctgattgataaagtcagcggaagcgatctgacgctaccgccgccatcggctaacgtcgcctccattcccctcgtcggcggtaagctgtatgcgttctggctgaaggcctcggcggacttgccggcggtactgagcagttatcacgcgcaaattggcgaggcggcgaaactggtgctcggcgtgctggcgagtatgggcggcgggctgctgggctttgtcctctcctttattgttgccggcgccatcatgacctggggcgcggcgggcgccagcagcgctaaacgtatcgctatccgtatcactgatgaaaataaaggtcttgccctgagccgcctgtgcaccggcactattcgcgccgtggcgcagggggtcattggcgtggcgctgattcaggccttgctgacgggaattatcattgcgttggcggggatcccggccgccgggatcttctttgtgctggcgctggtgctcggcatcgcgcagattccggtaatactagtcaccgccccggcgatcgccattatgtggatgaccggcgaccacggcaccgcggtgaatgtcgtgtttaccgtcctgctgattgtcgcgggaatggtcgataacgttctcaaaccgctgatgctgggccgcggcgtagacgcgccgatgccgatcgttctgctcggcgcgttgggcggcatggccaccgatggcattctcgggatgtttattggcgcgaccctgctctccatcgggtatctgatcttcatgaactgggtaaacgaaggcgcggcgaagtaaccgccttaccaccagtagctttccgccgggccgtacaggcagcgaaaaaaaacggctccctgatgggagccgttgcggtttctggcgctcgctactttattcagcggtggcgcgtaccggcggcgcagagtggtaatgcgcgtccgcttcagcaaaacgctgctgcatggccgccgatggcgccttgcccagcaggctgaagaccacaatcccgatactgccgaacaggaagccagggatgatttcatacagtcccagccagccgaactgtttccagacgataaccgtgagcgcgccaatgatcatcccggccagcgcaccgttacgggtcatacgcgaccacatcaccgagaacagcactaccgggccaaaggcggcgccaaagcctgcccatgcgtagctgaccagacccagtacgcggttttccgggttagcggccagcgcaatcgcaatcagtgctaccaccagcaccatgaagcggccgatccagaccaactctttctgaccggcgtttttacgcaggaaggctttatacagatcttcggtaatagcgctggagcagaccagcagctggcagctcagggtcgacatgaccgccgccagaatggccgacagcaggatcccggcaatccacgggttaaacaggatttgcgccagctcgatgaatacccgttctgcgttctgattaaccgcgcccgccaggctcgggttgttattaaagtaggcgataccgaagaaaccgaccgataccgcgcccgccagacagaggatcatccaggtcatactaatacgacgggcatgaacgatactgtggtgcgaatccgccgccataaagcgcgccagaatatgcggctgaccgaaataacccagaccccaacccatcagcgaaataatcgccacgaagttcagtcccttaagcatgtcgatattttcgatgcttttttgcttaatcacctccagcgaatcgccgaaaccgccgaccgagataatcaccatcaccggcgttaaaatcagcgcgaagatcatcaggctggcctgcacggtatcggtccagctcaccgccaggaaaccgcccacgaaggtataaacgatcgtcgcagcagcgccggcccacagcgcggtttcatagctcataccgaaagtgctttcgaacagacgcgcgccggcaacaatcccggaagcacaataaatagtgaagaacagcaggataaccagcgcggagataatacgcagcacgcggcttttatcttcgaaacgaccggtaaaatagtccggcagcgtcagggcattgttgttgacttcggtatgcacgcgcagacgcccggccaccagtttccagttaatccacgcccccagcgtcaggccgatggcgatccagctttcggaaatcccggagaggaaaatcgctcctggtagccccatcagcagccagccgctcatatccgatgcaccggcagagagcgcggtcacaaatggcccaaggctgcggccgccgagaatataatcgtcaaagttcttggttgagcgccaggcaataaaacctatcagtaccatgccaaaaatataaacaataaacgtcaccaacatgggtgtgctaatagccatgcaaatctccagaatttatttcgacaacgtccaactttgtcgttttagccactaccggaacggggtaatggcgtattggttgtattgggcgagcgtatcctgacggatgcgtcggtatttcacaaacgatttaacacagcatttacacgaaagttgtctcaggaaaaatagcaattttctataggttgcactccctcacgtttttacgggttgcacctgaaaaaactgttaagcaacgcagataaatacgttatttgaatgaggctatttattggaaattcttatcaacactattaacaattcattcatttctcagcttgctagccaggtcacaattaacaaggttgcacaaagttgcaacataggtgatatttctacgcaaccgataaaagggcattacatagctaacaggagttcccgcaatgggcaccaccaccatgggtgtaaaacttgacgacgccacgcgcgaacgcattaagtccgccgcgagccgtattgaccgcacgccgcactggctgattaagcaagccattttcaactatctggaaaagctggaaaacgacgagacgctgccggaactgccggcgctcctctccggcgccgccaatgaaagtgatgaagcaggcgctccggcggacgagccgtatcagccgttcctcgaattcgccgaacaaattctgccgcagtcggtcagccgcgcggcgatcaccgcggcctggcgtcgcccggaaaccgatgcggtaccgatgttgctggaacaggcccgtctgccgcagccgttaggcgaacaggcgcacaagctggcttaccaactggcggaaaaactgcgtaatcagaaaaccgccagcggccgcgccgggatggtgcaaagcttgctgcaggaattctcactctcctcacaagaaggcgtggcgctgatgtgcctggccgaagcgctgctgcgtattccggataaagccacccgtgatgcgctaatccgcgacaaaatcagcaacggcaactggcaatcgcatatcggccgtagcccgtcgctgttcgtcaacgccgccacctggggcttgttgtttaccgggaaactggtgtcgacccataacgagaccagcctctcccgctcgctgaaccgcattattggcaagagcggcgaaccgctgatccgcaaaggcgtcgatatggcgatgcgcctgatgggcgagcagttcgtcaccggggaaaccatcgccgaagcgctggccaacgcccgcaagctggaagagaaagggttccgttactcctacgatatgctcggcgaagccgcgctgaccgccgccgatgcgcaggcctacatggtctcttatcagcaggcgatccacgccatcggtaaagcctccaacggccgcggcatttatgaaggtccgggtatctcgattaaactctccgcgctgcacccgcgctacagccgcgcgcagtatgaccgggtcatggaagagctctatccgcgccttaaatcgctgacgctgctggcgcgccagtacgacatcggtattaacatcgacgccgaagaggccgatcgtctggagatctccctcgatctgctggaaaaactgtgcttcgaaccggagctggctggctggaacggaatcggctttgttattcaggcctaccagaagcgctgcccgtttgtgattgattcgctgatcgacatggcgacccgcagccgccgtcgtctgatgattcgcctggtgaaaggcgcctattgggatagcgaaatcaaacgcgcgcagatggaaggcctcgaaggctatccggtttatacccgtaaggtctacaccgacgtttcttatctagcctgcgccaaaaagctgctggcggtaccgaacctgatttatccgcagtttgccacccataacgcccatacgctggcggctatctaccagttggcggggcaaaactactatcctggccagtatgagttccagtgcctgcacggcatgggcgaaccgctgtatgagcaggtcgtgggcaaagtcgccgacggcaaactaaaccgtccgtgccgtatctacgcgccggtcggtacccatgaaacgctgctggcgtatctggtgcgtcgtctgttggaaaacggcgccaatacctccttcgttaaccgtatcgcggataataccctgccgctggacgaactggtggccgatccggtcagcgcggtcgaaaaactggcgcagcaggaaggccaggccggcttgccgcatccgaaaattccactaccgcgcgatctctacggtcacggccgcagcaactccgccggtctggatctggctaacgaacatcgtctggcctccctctcctcttcgctgcttaacagcgcgctgcacaagtggcaggcgctaccgatgctggagcagccggtggccgaaggcgaaatgcagccggtcatcaacccggcggaaccgaaagatatcgtcggctacgtccgcgaagccagcgatgccgaagtgcagctggcgctgaccagcgctatcaataacgcgccaatttggttcgccaccccgccgcaggaacgcgccgccattcttgagcgcgccgccgtgttaatggaaagccagatgccgaccctgatggggatcctggtgcgcgaagctggcaaaaccttcagcaacgccattgctgaagtgcgcgaagcggtcgacttcctgcactattatgccggtcaggtgcgcgacgatttcgataatgaaacccaccgcccattaggcccggtcgtctgtatcagcccgtggaacttcccgctggcgatcttcaccggccagattgccgcggcgctggcggcaggtaacagcgtgctggccaaaccggccgagcagacgccgcttatcgccgcgcaaggcgtagcgattctgctggaagccggcgtaccgccgggggtgattcaactgctgccgggccgcggggaaaccgtcggcgccgcgctaacctcagatgaacgcgttcgcggcgtaatgtttaccggttcgaccgaagtagcgacgctgctgcagcgcaacatcgctaaccgccttgatgcgcagggccgtccgacgccgcttatcgcggaaaccggcggcatgaacgcgatgatcgtcgactcgtcggcgctcaccgagcaggtggtgatcgacgtactggcctcggctttcgacagcgccggccagcgctgttccgccctgcgcgtgctttgcctgcaggaagaagtcgccgaccatacgttaaccatgctgcgcggcgcgatgagcgaatgccggatggggaatccgggtcgtctgaccaccgatatcggcccggtaatcgacgcggaagccaaagagaatatcgagcgccatattcaggcgctgcgcgcgaaaggccgcaatgtcttccaggcggtacgagaaaacagcgaagatgcccgcgaatggaatcacggtacgttcgtggcgccaacgcttatcgaactcgagagcttcgacgaactgaaaaaagaggtcttcggcccggttctgcacgtagtgcgctataaccgtaacgaactggataagctggtcgagcagattaacgcctccggctacggtctgaccctcggcgtgcatacccgcatcgacgaaaccatcgctcaggtcaccggcagcgcgaaagtcggcaacctgtacgtcaaccgcaatatggttggcgcggtagtcggcgtacagccgttcggcggcgaagggttatcgggcaccggcccgaaagctggcggcccgctgtatctgtatcgtctgctctccagtcgcccgcaggacgcggtcggcgtcactttcgcccgccaggatgcggagcgtccgctggacgcccagttgaaaacgctgctggaaaaaccgctgcaggcgctgcagcagtgggcggctggccgtcctgaactgcaggcgctgtgtcagcaatacagcgatctggcgcaaagcggcacccaacgtctgctgccagggccaaccggcgagcgcaataccctgacgctgatgccgcgcgagcgcgtattgtgcgtggcggataacgagcaggacgcgctgattcaactggctgcggcaatggcggttggctgtgaagtgctgtggccggatagcgccctgcagcgcgaactggcgaagaaactgccgcgtgaggtcagtgagcgcattcattttgcgaaagcggatcagttgaccagccaggctttcgacgcggtcatttatcacggtgattccgatcagttgcgcgagctgtgtgagcaggtggcggcgcgcgacggggcgattgtatcggtgcagggctttgcccgcggtgaaaccaatctgctgctggagcgcctgtatatcgagcgttcgctgagcgtcaacaccgccgcggcaggcggtaacgccagcctgatgaccatcggctaaaacgggctccccggtggcgctacgcttaccggggctacataaccccgccaaagggtagccgggccgccatccgggaaatctacggcgcgttcaactaatgacagccgacgacagctgtgcttaattaaggctcccggacgggagctttttttatgggagtagaacgatgaaacgcactttaattgccgccgctgccctattggccagcggcgcggcgtgggcggatgactgcagcaacgccaacacgcaaaccgaaatgaatcagtgcgccgccgcgcaatatcaggcggccgataaaaagctgaatgagacctggcaacaggcgctgaaacgcgcctccggccaacagcaggagttgctgaaaaaagcccagcaggcgtggatttccctgcgtgatgccgactgcgcgtttctcgcttccggcgcggaaggcggcagtatgcaaccgatgctgataagccagtgcatgaccgataagagcgtcgagcgcgaggccttcctcgcctcgctgcttcagtgcgaagacggcgaccaaaactgcccgctgccgccagctaattaacgtacgcggatcccttcgataatcatccgctgcacgttatccacggtttgctggaaaaacaactcatcctgcagcgttgcgccggttaccgcctccacctgagtggcgaaatcggcgtaatgctgtgttgtcgcccagatcataaagataaggtgctgcggatcgaccgccgccagcttgccgctatcaatccatgacgagattatcgccgacttttcatctatcaacgccttcagatcgccggtcagttcgcccatcagcagcggcgccccctgcagcatctccagacagaacagcctggaagcctgaggatgatcgcgcgatacctcaagcttgaggcgaatatattcgcggatcgccaccagcgggctgatatcttcgcgaaatgcccgcagcggcgccagccagatggcgaggatccgctgcagtacggcaacgtacagcgcctcttttgacgggtagtaatagagtaaattggtcttcgacaccccggctagttcagcgacctgctccagccgcgtaccgtgaatgccgaactgcgagaaggtctccagcgcagcggccagaatggcctcttttttggcgctcaccgcctgtgaacgcttgccggtttttttcacggcgccctgtgccatacgtcttctccttcagtagtcgtcttcagcatagcaaaagcccctcgccgacacgaccctgcgcactccaatcgcgcatgactgccgttttttcgtgcactgattttgaccattcagtccacatttttatccacaaatccagcaaccatttcacaacatattaataacaaacacttttttaaaactggcattacctttgctttatttccactgcgaggtggttcggggagaggcaggatgccgcaccgcgcaatttcatcttccatgacgacagagaggtagttatgaaaatcggtgttttcgttcccattggtaataacggctggttaatttccacccatgcaccgcagtatatgccgaccttcgaactgaataaggcgatagttcagaaggccgagcactaccatttcgacttcgcgctctccatgatcaaactacgcggcttcggagggaagaccgagttctgggatcacaacctggaatcgttcaccctgatggccggtctggcggcggtgacgtcgaagatcgagatttatgccaccgccgcgacgttgacgctccctccggccatcgtcgcccgcatggcctcgactatcgactctatctccggcggacgttttggcgtgaatctggtgaccggctggcaaaaaccggaatatgaccagatggggatctggcccggcgatgaatacttcgccagccgctatgactacctgactgaatacgttacggttctgcgcgatctgtggggcaccgggcgcagcgattttaaaggtgattacttcaccatgaacgactgccgggtcagcccacggccatcgcagccgatgaaggttatctgcgccgggcaaagcgacgccggcatggcgttctccgcccaacacgccgactacaacttttgctttggcaaaggggttaatacccccgccgccttcgcgcccaccgccgcacgtatgatgcaggcggcggaaaaaaccggccgcgacgtcggctcctacgtgctgtttatggtgatcgccgacgaaactgacgaagcggcccgcgctaaatggaaacactacaaggccggcgcggatgaagaggcgctggcatggctgaccgaacagagccagaaagatacccgctccggcagcgataccaacgtccgccagatggccgaccccacctccgcggtcaacatcaatatgggcaccctcgtcggctcctatgccaacgtcgcccgtatgctcgatgaggtggcggcggtccccggtaccgacggcgtactgctgaccttcgatgatttcctgcagggcattgacgcctttggcgaacgtattcagccgctgatgcgctgccgtgaccatattgctcccattactcgcgaggtggcctgatgattaccctttccgctcgcccggaatcgctgaccttcgcgccccagcacagcgcgctgatcgtggtcgatatgcaaaacgcctatgcaagccagggcggatatctggatctcgccggttttgacgtctccgccacccggccggttatcgataatattaatctcgcggtggccgccgcccgcgccgccggcatgttaattatctggttccagaatggctgggacgaacagtatgtggaagccggcggccccggctcgccgaattaccataaatcaaacgcgctgaagaccatgcgccaacgcccggaactacagggcaagctgctggcaaaaggcggttgggattatcaactggttgacgaattacggccctgggagggcgatatcgtcctgccgaaaccccgctacagcggctttttcaataccccgctcgacagcattctacgcagccgcggtattcgccacctggtattcaccggcatcgccaccaacgtctgcgtcgaatcgacgctacgcgatggtttcttcctcgaatactttggcgtagtgctggaggatgccacccatcaggcaggtcccgtcttcgcgcaacaggcggcgttattcaacattgaaacctttttcggctgggtcagcgacgtcggcagcttctgccgcgccatagaacccgacgccccgctcgcttttaccgaggagaaacgctatgcctaaacaggtgataattccccccggcactgctacgccgattgccccctttgttccagggacgctcgccgacggagtggtatatgtctccggcactctgccgttcgataagcaaaacaatgtgatctaccccggcgacccaaaggcgcaaacccgtcacgtgctggagattatcaaaagcgttatcgaaacggcggggggcagtatggcggatgtgaccttcaacagtatctttatcaccgactggcaaaattacgccgcgattaacgaggtttacgccgagtttttccccggtgataaaccggcgcgtttctgtattcagtgcgggctggtgaaacccgatgcgctggtggaaattgccagcgtcgcccatatcggtactccaacatgatgaggctcaatattgccccgccgccgtggcccggctccccggtggtggtgctgagcgccgggcttggcgggggtagcgcgtactggctggcgcagcgggcggcgctggaacagcattatcaactggtgtgctatgaccataacggtaccggggagaaccgcggcccgttgccggaaaattacagcatggcgacgatggcgcaggagctgttcagcgccctgcaggcggcgggcatcatgcgcttcgcgctggttggccacgccctgggggcgctgattgggatgcagttggcgctcgactatccgcgcgcggtcagcgcgctggtgctggtaaacggttggctaacgctttccccgcatacccgccgctgctttcaggtccgcgaacgcctgctgcatgccggcggcgcccaggcgtgggtcgaggctcagccgctgtttctctatccggcggagtggatggcggcccgcctgccgcgtctcgaagcggaagacgcgttggctattagccatttccagggcaaggagaatctactgaaaaggctgcaggccctgaaacaggcggatttttcgcgccgcgcggcggctatcgcctgcccgacactgatcatcagcgccaccgacgacctgctggtccccgcctcctgctcgcgaatgctgcaggcggcgattcccggtagccgactcgtggaaatggcctggggcggccatgcctgtaacgttaccgacagcaacacgtttaaccctattttacgcgacggcctgacgaccctgctgccggtcgccgaggagaatatatgagcgaagcaatcaatcaaaaggcttgcgagaccctattcacccatgcccggacctacaatggctggcgggaacaggcggttaacgatcggcagctgcaggagatttacgacctgatgaaaatggggccgacctcggccaactgttcaccggcgcgaatcgtttttgtgcgcagcgccgagggcaaagcgaaactccgcccaacgctctccagcggcaatgtggaaaaaaccatgcaggcgccggtcaccgccatcgtggcctgggataacgcgttttacgagcgcctgcccgcgctgtttccgcacggcgacgcccggagctggtttacttccagtccgcagttggccgaggaaaccgcctttcgcaacagctcgctgcaggcggcgtatctgattttcgcctgccgctcgctgggcctcgacaccggcccgatgtcggggttcgaccgcgagaaagtcgatgcggcgtttttcgccaacagcggctggaaaagcaatctactggtgaatatcggctatggcgaccccggcaaattgtacgaccggctgccgcgcctgagttttgatgaagcctgcctgctggcataaggagacggtaatgaacgtagcggatcaacacagttttcgtgacgccatggcccatgtcggcgcggcggtcaacattatcaccaccgaagggcctgccgggcgcgccggttttaccgccagcgcggtatgcagcgtaaccgacaccccgccgacgctgctggtgtgcctcaaccgttcggcttcggtctggccggtattcagcgaacatcacgccctttgcgtcaataccctcgcggccggacaggaggccctgtcgacgctctttggcggtaaaacggcaatggatgagcgctttgccgccgccgactggcaaaccggcgcgaccggctgcccgcggctgaaagaggcgctggtcagtttcgactgccgcatcgaccagcggctacaggtcggcacccatgacattctgttttgccaggtcgtagctatcgcccgccagccggaaccgcgcggcctgatgtggtttgaccgcggctatcacacgcttatgcggcccgtttgttaacctctcacccgggatatcatcatggcactcttcgattttcctcgctggcagttaaccccccccgccgcagatgccggcgttgtcgccccggatgaacgtttatccgccgggcaaacgctgatcatgggcgtgcagcacgccgtggcgatgtttggcgcgaccgtattgatgcctttattgatggggattgaccccaacctggctatcctgctgtcgggggtgggcactctgctgttctttgtcgtcaccggcggccgggtaccgagctatcttggctccagcgccgccttcgtcggcgtggtcatcaccgtgaccggctttactggccaggggttgaatcctcatctcagcatcgccctcggcggcattatcgcctgcgggctgctctataccctgatcggtctggtggtgatgaaaatcggtaccggctggatagagcgactgatgccgcccgcggtaaccggcgcggtggtgatggcgatcggtctaaacctggcgccgattgccgtgcacagcgtttccgccaacgccttcgacagctggatggcgatgctgacggtgctttgtatcggcgccgtcgcggtctttacccgaggactgctgcagcgtctactgatcctgatggggcttattatcgcctgtgcgctctatgcgctcctggccaacgtattcgctcttggcaaaccgctggattttgcccctgtcgcccaggcagcatggtttggggtcccgcactttacttcccccacctttgacagccaggcgatgctgctgattgcgccggtggccatcattctggtggcggaaaacctggggcatttaaaggccgtatcgggaatgaccgggcgcaatctggatccctggatggggcgcgcgtttgtcggcgacgggctggcgaccctgctttccggcgcctgcggcggtagcggcgtcaccacctatgcggagaacatcggcgttatggcggtgaccaaagtctattcaacactggtgtttgtcgccgcggcgctgatcgccatcctgctcggcttttcgcccaagttcggcgccctgattcatacgatcccaggcccggtcattggcggcgcatcaatcgtggtctttggtttgattgcggtcaccggggcgcggatatgggtgcagaatcgggtcgatctcagcctgaatgcgaatttaatcatggtggcggtgacgctggttctgggcgcaggcgattttaccttgtcgctggggggctttcgccttggagggattgggacggcgactttcggcgctattttactgcatgcgttgcttaaccgccgtcagcaccaggaaaaggtggcaaaagccactacggtataatcagggttcgccccggcgacgcgcgccggggccataattagggctcgcgccgctcagcaagttctggcgcttcctctgccgcaatctgcggccgcgattttttcttccacttcagctcgctgaccagcactccggcgagaataaacagacagcccaccagcgccaacagcggcagacgctcgccggcgatacgaccaaacacgccagcccaaaccggctcgccggtgtaaatcagcgtcgcccgcgtcggcgatacgctacgctgcgcccagttcatggtgacctgaataatggcgctgaaaatccccagtcccagcgcgacggccagcagttccgggcgcatcggcgggatagactccccagccggcgccatcgcggcaaaagccaccagcgaggcggtcgccagctgtaccactgtcacccggcgcacatcgacctgacgcgcccacgcgctgattaaaatgatttcggcagcgatagccaccgcgcttgccagggtaatcatttcgccaatccccaaagccagcagattgttttccggccccgccagcaggatcagcccgataaacgccaacacgatgcccacgcaggacatgacgccaggcatgcgcccaagacacagccactgcaacagcggcaccagcggtacatacatggcggtaataaacgccgatttactgctggagatggactgtaagccccaggtttgcaggctgtagccgagcgcaatcgccacgccgatcgccacaccggccttaacctcaagccaggtcaggccgcgtaacgtacgcagcgacagtagcgccaccgccagcgcggcggtggcaaagcgcaggccgacgaagaaaaacggcccgctaaagttcacggcgtactgtacggcaagaaaggtaccgccccagaacatggtgatcacaatcaggatcagttcctgcggcgttatcgagagtttgagcgaagacatgaggcgaccaatagcaataaatagctaaccagtttcgcaggcgcttcaggccgaaagcaacacccatagacaaaaaaaccgccgacatacgtcggcggcgagggtgatgcggcagggtcgggggagattaacaccgcatcataaaagacagtcccggctagctattgcgattgccgtgactatttttacccccttttttgccagcttccgaggcgcgttgaggatcgtttttaaagttccccccgctgtgctggccacctttacgacctgcttctgatgctctggcacgatcttcggcaaaattgccggaaccgccacgatggtttgccattactgacctccattgggtttgacatcatattgcattaggtgagttctgggcctaagcccccgcggcatatggcatggccattatgcatcgcgtgcttataagcgtagtaaatgaaactcattccccaagcaaatagtcacattccgcaacatttaatcgtcaaaaccagacgccagcggcgatcgcaaccgctaagcatttcttcttacagctgaaatcagccctgcgcaaaatgtatctatttgctacgaggcatgttgcaaattaatctttgccattttgttataaatcaaacaaatgtttgttggatttgcactctgcgccacaggtcttatctttataggtagccagtcgtttggctggacaattacgcaaccgaggagtgatgcaaatggctaaaattctggtgctttattattccatgtatggacacatcgaaaccatggctcatgccgttgccgaaggggcaaataaagttgacggcgttgaggtggttgtgaagcgcgtgccggaaactatgcaggctgaagcgtttgccaaagcaggcgggaaaacacaaaatgcgcccgtcgccacaccgcaggaactggcggagtatgatgccatcatctttggtacccctacccgtttcggcaatatgtcgggacagatgcgcaccttcctggatcagaccggcggcctgtgggcttccggcgcgctgtatggcaaagtcgccagcgtctttagttcaaccggtaccggcggcggccaggagcagacaattacctcaacctggactacccttgcccatcatgggatgatcattgtgccgattggctacggcgcgcaggagctgtttgatgtctcccaggtgcgcggcggcacgccatatggcgcaaccaccatcgcaggcggcgacggctcccgtcagccaagccaggaagagctggctatcgctcgctaccagggtgagcacgtcgccaatgtagctgtgaaattacacggctaaccttcaacaggaggagttgcatgccgaatcaagaagcgaaggcccaccacgtgggcgaatgggcaagcttacgtaatacctctttggaaatcgccgaagccattttcgaactcgcgaattacgatgaaaagttggcggagaaaatttgggaagaaggcagcgatgaggtgttgtcgcgagctttcgccaaaaccgataaagacagcctcttctggggcgaacagaccatcgaacgtaaaaacgtctgatagcgcaattgcgcgggcattgcgcccgcgctcattcatcacccggactgctccgggttttttgttttattttgccgcctcgttcatgacctttttgaacgtctccaacgggcagaatccctggtcatcaaccggacaaccgttaagcgccagcgtgacccgctgcggtggagattgcaggctcaaagcatccgcgttgcgcagctgttcagtactttgatagacatactcaatcttcattaaatcgcgattgctgccgctatcgtgccagcgctggaacagcagcttgccgccgatgggggtgcgctcatactggccgggtaactggtagggtttaaagtccagcgccgtcagcagcgaagcgatgttggaatcatgcccgaccagcagcgtcactttcgccttagcggcgccatcgcccaccagcgcattatcgatatatttgaccagcggcttagcgacgttgcgcgccacttccgcggaagtaaacaggctgtcctgatagccgtttttcagttttgacagcacctgccactgcttatcgctggcaatttcgccccacgccacctgatccttcggaaaaccttcgtagtactgcagggtgaaggcatccaccagcgagttaccgaccttcagcggcccggaaacacctggctcctgctgatatttggcgctaaaggtatctttaccgtcgctaagcgagcagacatgcttttctttacaggatggcgaattacgatagtcggtcatctcttccagcagcttgtagctctcagcgagctgcatcccctgacgctctttttccattgcctgcaccgctttttgcgcgaattcggctgaatcgtcagtaatgaccgggttgaacgtgggatccatcgttcccatctgcggctgatgattcacaggcaccccgcagccagggaaagcgccggtaataaagaactgcgcggtggcgacggtgcgctgcaggctattagcgtaggcgtagacggaattttccggcgggcattcgccgctggtcaccagcttctgctgcgccagccactcacgcatatagtggcccatatagacctccagcacgccgcctttggtggtcaactggccacctggtacatcccactgcggccaggatttcggcgtcgactgctcaagtacgctgccgttattggccagcggcgcgcgcaggttgtggcggctcatgatcagcacctgttgcagttgatacccttccggcgcaacggcttcctgcgcctgggcgccggcggataacaatacggccccggccaccgcagcggcgagtagactttttttcatcccttcatcctcagtcatttattatcatcgccatcattgtgacggatttatgacatttttgcggacaatggctcacaaactgaggcgtcggtcgctttttgtcgtagagggcgtggcgaaagcggctcctattccggtaatggcaccgccgccagcgtacaaatcgcttcatgttcgccgccccggcggtcgaccatcaccactttatccccggcctttttaccttcgcagggttttaacacctgctcgacaattcgttcgcgaacctgttggctttccgactgcgcccaactggcaaaagccgtcagcgtaagcgccgaagcaagcaggccggcgagacttgttttaaacatgcattactctcagaaaattcttattcaacggttagcgtaacagccgcaatcccatccgtctgtaaaatgacttaacggagtgttacatcagacgctaaggcgcgcacatagcgtcacaatacattaacagcatcaatattttaacataatgagccatgctggatgcctttggcacttttaggtcatctttcggaaacatcccgatgttatcgtcttcgtgaggcgttattttttcttctgtttaaacaaattattaggttaatttatgtcgggtttcttgctctttatcgtagcgatcgctctactgggtgtcgccgtttacagcctggtgtcttacatcaaagaacgccgcgccggtcagttgccaactgataaaaaaaagaaataaattcactttgccaatctttacacccgggctgcgtattaccagggaagaagccgatctcacggtcggcttcttcccgtctatacaataagattcagctcaataccccatatgttgatatgccctattgacggctaaaacagtcaatgacaaaccagcgccaaaagcgataattgcaggaatgactatactcgccacgatccacagcgtagagatatgttcaggtttaggcgtaaaactcacattataaaacagccacgaaatcatcaggcctcccgatacaataacgctgtgcacaacaggtggtatcgtatggccccacttagctttgtcgggtaaattcgtcttctttgaagacaaggaagtaatagcaaacttgttattttcagatgtcgccaccagctgctcgccttgcgcatacctaacggcatcggcagccagcgccaaagccagccatcgataaccggcactcttttcccctagtgaggcctccatatccaggcgttctgacgccagattttttgcatctaacgcctgcaataatgggtatttatccactctggacaatcctgtataccacagtgttttaggtgcaataacggacttaacctccagatagaccggcatcttttcttctacatcagtaacgccggacatcggctgataaagatataccggcttttcgcctgctcctctgacatagtgattagtgaacaaaaacgcacaggcgctttccatgcttttagaatcgctatcttcttcatgcatatcgacagtaatgacgattcggttaatgacgttgtcatcgggcgcagcgatccatttatccaccatgccgtactccggacactcggtaaggtattcgatttcacaggcgttggcgttagggatattcagatgctccagcaccctcctcaatgcatctacacagaagttatctcccccacgtacccagacgataatttcaattccgcggtaattattaccgttcaacatcatagacattggggtaagcaatttcgtgaaaatttgctcattacgggtctgctcgaaaagatcttcaatttctatcctgagaggggttttcggcgctaacggaaactctccctccagtttcagcatattgagcgcaggctgttctaaaggggttagagtagtccaggcggctagcgcgatattttttcgggcataggttttaagctccacctcccaggatttggcaatatatttgcgtatttctgcgtaacacactgtcgcactcaataccatcttcacgaagaacaatatcgtggtcaaaacacaggcaggaagtaatacggaaggaatgaagaactcacacgtgaccggtttattttcaggccagactagcgcctgtataaacaggcataccgcgataagcgctacataaatcatcacgacagccaatacaggcatctcatcctgaatatcttcctgctcagaatatagccaccattccattacaccgctcccgcagtttgtagcgtcgttcgtatcgcgcatccacattcagctttacagccatccaccaccacaccgcgaccgttcatcgtccaaaaggggtggcactcagtaataccgaaagtccctttgtgcgtagcacactgaactttgtcaccttttagggtgacaggggctcccataaattcagcaccggatgatgtgatcacttttcctccgcccaccagcggatcatttaacctaatgacacctttcattatttttgctcccttaacgtcctgcatccatatcacaacgcatatgatcccaaccggtatagccttttacttcgggtactctgtcggggagcccctggtagttggtgtggaattttgccgtatcgttctcaagtccttgtttggtcatataaaccattccccatgaccaacctggaaactggggggttatagtgtgagtttccccttcaatgacatattggataccagggccaccagccgccagacgcggatcgtcgaacggtttggacgacatatacaggcgatgcctggtctgcaaaaaaacctggtcgttgacgacggtgaaagagagaacatcatctcgagggggagaattcatcccatccggctcgttataacccggcgaatatccgacagggctccaggtttgaccgttatctttcgagacaataaacccatctatttcccagttaggaatagcaatatagcgctcagaaggatgaataaattttttagtatatattctgtaaaattggctaactggttcggtgtgaatccccctcagtgtatccgtgtaccagagttcaccttcacagccccaccccttcagctccagatagcggtggtcatcgaaacgataaataacctgcgtcggcggctgttgcgcctgacatccaacggccataagcatggccgccagagcggtgaataatcctttcatggctatctccccgcatccatatcacaacgcatacgatcccagccggtgtagccttttacttcgggtactctgtcggggagtccctggtaattggtgtggtattttgccgtatcgttctcaagtccttgtttggtcatataaaccatcccccatgaccagccgggaaactggggggtaatagtgtgagtttccccttcaataacatattggatacccgggccaccagccgccagacgtggatcgtcgaacggtttggacgacatatacaggcgatgcctggtctgcaaaaaaccctggtcgttgacgacggtgaaagagagaacgtcatcataaggcgcgtaattatcgccatttggctcattatgccccggagaaaaatgagcatcggaccatgtttgaccataatcctttgatattcgaaaaccatctgccccccaaccaataatggcgatgtatcgctctgatggatggactaacttcctggtgaaaacgcgataaaactgcgagtatatttgcgagtgaattttcctttggctatccgtataccaaagctcaccttcacagtcccaccccttcagctccagataacggtggtcatcgaaacgataaatgacctgcgtcggcggctgttgcgcctgacatccaacgaccataagcatggccgccagaacagtccctgatgtgtatctctgcttcataaatattccctagatatcgagcgctgaccgttggtttcctatacccagttccctgtcacttttgggtttcggcatctcccactgcaggtttgccacttcctgattaccggcagccaggtcgcgggatggcctcaccctggtcgcattgttaaattcgtttaacaccccataattgccatgtggaagcacctcatccggcttattcatatgattctttgtctgagcccccggaagcctccctgtacggtaatattctttagccgcgatatttccattcaaaggatcgcgccagtctgcacgatgcagtagatcttcccagaacttacccgctttatagtcaaatgaacgacatggaccaattgccaggtcaaacgccatagcatgggatggggcaaattcgctcataacgatcgatgagtgctggctgtaacccaccgggtcggctttctgccattcgttttcaagctcttcgcgaggtttaagccatgtcagcgtaagttgagaaaagtctttcgttccaatgacctcaccatgaataacttctacctttcgctcatagctttccattttcagctcatccgccgtcagaatatggccagggcgccaactcaggcttgcgtaacggctaagcgaataggtggcgctgcgagttcgtttgatagcgtaggcttttgctgaataggagatataggcatccggactgtccggatcgatatacgcggtatacggtttatcgctcgttttcggatcattgtccggatggttatcctgcccctgcagtttaaagacgaacggctgcggcagttcttctccattaacgacaacatcatgcgcggtataagccgtgttggtgagagagctatattccgcatcccctttatgtgatggcggtaactcaaaaggcttcccggtcggggcgattccggtctgcccatgctgatagaaaacccgttgatacagattgggaatagcactggctatgttcctggggatcccccgccagccaattccctgaatattcttcagcgataccgtgccatcgtttggacagaaatagttatagaccttgccattattgtcccgacggtacttttcatcctgccgcagtgggctatctgacgcttttcgtaacgtacaggccccttccattgccagcaggttagcttctgatatttcaccgcctttgtactgagttgccatcaacgcacaaaaatttttaaaggtcgtttgccgggcgttatccgtctggtgatgcccgggctgaatatcttcactcagacgcccttccagcgaatacggcgagtgattcaaaatgacacagttaactggctggcttccggcctgttttaccagcatattcgccagcatggtaatgattgtgccctggctatgcgcaacgatattaatcacatcattttccgtcactggctcacttcggattgtcaggatcaaatcggccagacgttgcgcggcaaaaaactgataaatacgatgtggattagggaaaatagggtgcgtaaaatcaccgccgttcatgtacagcgtgctaaatccagctgcggctaacgctacccctcccgcacccggtccgagcatatccgggatgttcgttgtggcgttcgcgaacgtcccgccccctttggcaaagttaacatcaagggcatttttaaagttgtcgttctggtacttaaacctacctttgccatcgttacccagttcagctttcttatcggcgttatcttcctggtaagcgtcaaacggcaggtgcgcgctgtcttgtagcttgctgacctcattccggtaacgctgttgatcgcccatgtactcttcacgcgtgacaggcttatacccccaatagaacgggatgatgggggaacggccgggaacggtgattcggtagtctttccattcgtgggcgtaaaaatccggccgattaagccgtttcttcagtccggcaagaatccccctctcctgattctggtacgcctcgccgacgtcgttcacgccatggaccaaaatcactatccccggcatcggtcggggaatgccaaccctgcaggtctgcgcctccagccccagcgatttatgcactcccacatcgttctcggacacgatacgcgggcaatacggcttctttttctcgccagccattacagtacctccagtttgtacgaatcaagatcggccgaatcgagcaatggagaacaaccattgctgtccgtctcgccctcgagcacttcgccggttgagctcttgagcctgaaaggacgattcgccagaacctgttccggatcgtcagaagcatgcagttgatagcgacgcgtaaaggttcctttatcaaaggcaggtgcttgcacctgcgcgctttctggccccagatacctgagattcggccctttaatatcgaccccgacaggagagaaaatctcaacctggccatcagggctgatacggatcccgccgcctccgcacaccagttgtatgccctgtttggcgctgccatgcagtctcccgtccgtactggttagcgtaaaatcctgctgagagagcatatgtatggcgccgcgctgcgcctgcgtggtgatatccccggcgccggcaaccatctgaatacctagcttgcgggcaaacaatgagagtgtttcgccaacggccagcgagaatttcttcatcacgttcatactggcgtgacgacctgccgtcgtaatcacatcctgtccagccgacagttgcagactttccggggtcacatgcgcctgtccttgcccgccataggtcagcagagctgcgccgctgagtttattcagcgtctggccgagcgtattttgccgatcggtatccacattactggcgccggccgttagtgcgctttgttgcaatgtcattgccagcgagagcgctttttccagttgcgtaatcgcggcggtcatatccaactgctgcccctgggcccgcggctgcgcttgcgtggtgatcatcaccccctttgccgcacgcaaagccatccagtcatcggtacgggcctccagcccttccccgcgtttttttccttccgcatcgacaaggtggcccagattgagttgccccttgccgtgctccgtcgaaatcttgatatgctccttaccccggcggtcctccagacggattttgttcagcgctgccgtgcggataatattgcgggtatcattacggtttgtgaccagatcggggcgagcgccgtcatgcatcacatgcgcaatgaaaggcctgtccgggtcgctggttgttgcactgagccggctctgctcattcagtagacgttcatagcgtaggcgggcgtaaaacgtggccgtctcagcttctgttgcgtgaaaatcgccgtctgcgaggtaatgatcggcgtagtgatactctcccccggacgtaatcccctccgggatatcattattgataatggttttaacagcttgtggagaatacggatcgcgatagttgtaggtgcgtactaatacctgttcaggaaccagcgagtgctgctcttccagatcggtcacgtactcgtcatagctggtcatcccggaatagcggacgtaggggagttttttatcgcggtaaatgtatcgactgtcagaatcagcaaaaatcaccacggtttccgtctgaaccttatggtgattctcaaaacgaaaccagatgccaatttcagccaacagtcgacgaataaactgcagatccgtttctttccactgaataatcatttcccttcgaggataggtataactcagcttgtcgaaatcgatattatagcctttgaagtagccgctatttttcataagctgcgtaacaacttccggcacggtgacatccgtatacaccgctgagcgataatttttatccagcagcgcaagctcatgctccagcacgcactcatatagcgcctcatctgaggacgacttcaggcgggtaaattgtgttataacgccgttaatctgacgtaccggcaaccaggcagcctcgttctgccaacgcgtgttcggattaggcgcccgaagataaaactgcgcgatctgattgagagcagccccggcggggatattgtcatcggcactggaaaaacggatggtataccgatacggtttgctgagcgtctcttcgcctataaaagaatgcacatcgacaaccgtacttttgcttcgcggaaagtaaagcaaataacggtttaatgtatcctgtaattgaattattttagtttgttctgtcataaccaaatatccttttgataaaacagcactgaccaaaaataatacgcccagcaacacaaaattaaaatataagtttattatcccacaatatataatattatcgagccattatattcacagcggaaataaaacccgttcatttaaaatcgacaaaaaaacaaaagatggggtaaaagcagatattcaagtcattaaaaagggctccatgataaacatggagcccttattcgatatcaggcctggctgccttgttgtcgtggtaacagcaaattacgactcccaggcctgctccgctttcgtcgcatcaaactgcggcggcggtttacggaaacggcgggtcaggtaggtcagataaagcaatcccagcgcggcccacaccagccccagcgtcagcgaggtcgcctcgaggttcaaccacagcacccccacggtcagggcgcctaccattggcaacagcagatagtggaagcgatctttccaggttttgttataccccttgcgccgccagaagtggttgtataccgagagattaacgaaggtaaaggccaccagcgcgccgaagttgataagcgccgtcgcggtcaccaggtcaaagaacagcgccgacagcgcgacgatgcccaccataatcacgttcagcgccggggtacgccatttcggatgcacatagccgaaaatgcgctccgggaagacgttatcgcggcccatcacgtacagcaagcgcgacacgctggcgtgtgacgccaggcccgatgccagggtattaacaaaagtggtgcacaggaaaatcgactggaacagcttgccgccgacatacagcgcaatttccggcagcgcggcgtccggatctttaaagcgatggatatccgggaagaacagctgcataaagaacgaggcgacgataaaaataatgccgccgtacatcgcggtaaggaagatggccttcgggatcacccgcgcggcattcggggtttcttcagaaagcgtggtaacggcgtcaaagccgaggaacgagaagcagacaatcgtcgcgccggtaataatcgggatcagatgcgcattctcgctgataaacggctgcagagaccagacggtgccaacgccctcgcccttatgcagcccttgtaccaccagaatcacaaacaccaccatgatggagatctgcaccagcacgaacagggtattgaagttggccaccaggttaacgcttttcagattcgccgcggtcagaatggcgacaaaggtcaccacccacacccacggaggcacttccggaaacagcgcggagaggtagatcttcgccaaaaggacgttaatcatcggcaggaacagatagtcgagcagcgaagaccagccgaccataaaaccgatgtgcgggctaattgatttttgcgcataggtgtaggccgaacccgcttccgggaactggcgcaccagcttgccgtagctgatggcggtgaatagcaccccagccagcgccagcaaatacgaggccggaacgtggccattgctgatgccggaaacgatgccgaaggtatcaaacaccgtcatgggggtcaggtaagccagccccatcatcaccacttgccacagtttgagcgatttacgcagacgcggttttcccgcctgagcggcgttttctgcaggaagattagcagccatgacgcattccccccatgccgacgacagtttgcgggcacaaagaccgggtaacaaacctgcttagcaagggggtaaggcgtaaataaaagggtaagacggaccgatgaacggcggtaagttggcatccaatgcggccaaagaggcccccttctccctgcggatatttgaacatctgcatcatctcatttcctcgtcacacactgtgtcgttaactgaagccccgttgccgcctgcgctccttaacgcgacatccgggaaatggctgggctcccagcaaaaaagaacgaccaggctccgctcaggccgtatgatgctaccgattaaactaatgcgccccttacggggcgaacatcaggcgtttttcaacatccactcaatttccgtttctgtgataagacgctcgaactgcagtaactcatcattcttacaggcgtggtaaacgtggcagaaacgctcgccaagacgctcccgcagatgatcgttttgcataaactcccacagggcgtcgctctggcggatcgggaacggcaagccttcttgttccagaccgttaccttccacctcgtcctgcagcggcagcggattatccagcccgtgcaggataccggcgaaaatcgccgccatcaccagatacgggttggcgtccgccccggctacgcggtattcaacgcggtggttatgccgatcgccacacggaatgcgcagcgctaccgtacggttgttatgcccccatgacgcctgcgtcggcacatacatgcccgcctggaagcgacgatacgagttcacgttcggcgccagcagcgccatcgacgccggcatcagatcaatcatcccggccagcacgcgtttcagcagggctgaatcctcgccgtccgcatccgccagcacgttttcgcccttattgttttgcatgctgatatggatatgcatcccgctacccgcatgttcttcataaggtttcgccataaaagtggcgtgcatcttatgcttctccgccattaaacgcacgagacgttttaatgccagcgcatcatcgcacgcatccagcacgttatcggtgtggtggaggttgatttcgaactgtcccggagaggcttcggccaccgcgccatccgccgggatcagctgtaactgggccagttcgtcaatatcattcagtacatcggcaaaatggttgaggttatcaacggaatagacctggctttgggtattacggtcgtcggtgccaggcgcgcacggcggctgcaggtagccttcggcatcgcgtttgcgatcgagtaaatagaactccagctctaccgctaccacggggaacaatccgcgctggcggagctgctgccagaggcggttgagtacgttccgcggctcaacgtcaaagggagcgccatcttcatcaaccatggtcaacaggacctggccgatgtattccggatcggctgccgaaggggtcaacgtgcccaataccgggacgcagctgcggtccggttcgcccatatcctggccaagcccggcctcttccaccacgttgccgagaatatccatcgcgaaaacggacgccgggaagtagcagcccttctccagcttgctgaggctggcgaccggaatgcgtttgccgcggaagcagccgttcaggtctgtgaggagtacatcgacatactgagtgttggggtaggtttcgaggtagcgcttcacttctttagcgaacgcgcttacccgtctctcttccgtctgctgaacaaaattctcaacttctacgatattggtatccatgattcaccgccgttgttttagttttcggaccctgactgaaaacgtcaaatataatgtccacccttcgaatgtgtatgcaaacaaaatgtttgtcaaatgttaaattaagtttgcaaacggctatttccactgctagattgagaaaatattgaacgatatggccgtttatcagccacaggcggtcataatttagtccactttgtgagggcgatcatggaaaatataatgtacaacccagttattggcgtcgtgatgtgtagaaacaggcttaagggtcaccagacccagactctgcaagaaaagtacctgaatgccattgttaacgctggcggactgccgattgccctgccgcacgcgctggccgagccggaactgctggatgcgttagtcgataaactggacgggatctacctgccaggcagccccagcaacgtgcagccgcacctttatggtgaaaacggcgatgagcctgacgccgaccccgggcgtgatcttctgagcatggcgctaattaacgccgcgctcgaaaggcgcatccccattttcgccatctgccgagggctgcaggaactggttgtcgccaccggcgggactctgtatcgtcgtctgtttgaacagccggaactgctggagcatcgcgaagatcctgaactaccggtggagcagcagtatgcgccgtcccaccaggtggaggtgcaggaaggaggtttactttctcagttaataccgggctgcaacacgttttgggtaaactcgctacacggccagggcgcaaaaacgctgggttcgcgtctgcgcgtggaggcccgttcaccggatgggctggttgaggcggtcagcgtcaacgaccaccctttcgcgctgggcgtgcaatggcatcctgaatggaacagtagcgaatacgccctgtcgcgtatgttgtttgatggttttatcaccgcctgtcagagccatgtcgccgaaaagcggcggctctgaccactacagttaaggaaatgcaaatatgagcgatgacggactggcgccagggaaacgtctgtcagagatccgccaacagctgggtctttcacagcgtcgtgccgccgaactgtctgggttaacacatagtgccatcagcaccatagagcaggacaaagtcagtcctgccatcagtacgctgcaaaagctgctgaaagtatatgggctgtcgctctcggaattcttttctgaacccgaaaagccggatgaaccgcaggtcgtcattaatcaggacgatcttatcgaaatggggagtcagggcgtttcaatgaaactggttcataacggaaatccgaaccgtacgctggcgatgatttttgaaacttaccagcctgggaccacaaccggggagagaattaagcatcagggtgaggagataggcaccatactggaaggtgagatcgtgctgacgattaacggtcagtcgtaccacctggtggctggacagagctatgccattaataccggcatccctcatagcttcagcaacacctcggcaggaatctgccgcattatcagtgcccacacccccaccacattctgatttcttagcctgagcaggtttcaggctttcttcaggcctgtcgcggcggatgtaatatttccgccgcggcgaagaactcgcagtaataatacctgcgcagcgcggaaatcttatttcctgccggcccaaagataattaacgccagtgaatggcgaagagacggttttctaccccggggacgccctgcgccctgagcccctgaaaacgccgaaccctatattttgccgatgatgtttttaaggagtcatgatgaattttcagcacctggcttactggcaggaaaaagcgaaaaacctggccattgaaacgcgcttatttattaacggcgaatattgcgccgcggccgataataccaccttcgagactatcgaccctgccgcacagcagacattagcgcaggtcgcccgcggtaaaaaagccgatgtcgaacgggcggtgaaagccgcgcgtcaggtttttgataacggcgactggtcgcaggcctctccggcccggcgtaaagcggttctcacgaaatttgccgacctgatagaaacccatcgtgaagagctggcgctgctggaaacgctcgataccggcaaaccgattcgccacagcctgcgcgacgatattcccggcgccgcccgcgccattcgctggtacgccgaagcgctggataaagtttatggcgaagtcgcgcccaccggcggcaacgagctggcaatgatcgttcgtgaaccgattggcgtgattgccgcggtggtgccgtggaacttcccgctgctgctggcctgctggaaactcggcccggcgctggcggcaggtaatagcgtaatcctcaaaccctcggaaaaatcgccgctcaccgccctgcgactggcagggcttgcgaaagaagccggactcccggacggggtgttaaacgtgatcagcggctttggccacgaggccgggcaggcgctggcgctgcatcctgacgttgaagtcatcaccttcaccggatccacccgtaccggcaaacagctgctgaaagatgccggcgacagcaatatgaagcgcgtgtggctggaagcgggcggtaagagcgccaatatcgtcttcgccgactgtccggatctgcaaaaagcggtcaacgccaccgccggcggtatcttctataaccaggggcaggtctgcatcgccggcacccgcctgctgctggaagagagcatcgccgacgagttcctggcattactgaaagcacaggcgcaaaactggcagccgggtaatccgctcgatcccgataccaccatgggaatgttaattgataacgcccatgccgacagcgtacacagctttatccgcggcggtgagaccaaaagcacgctattcctcgacgggcggaaaaatccgtggcctgccgccgtcggcccgaccattttcgttgatgtcgacccggcctcaaccctcagccgcgaagagatcttcggcccggtgctggtcgtcacgcgcttcaaaagcgaagaacaggcgctgcagctggccaacgacagcgactacggtcttggcgccgcggtgtggacccgcgatctgtcgcgcgcccaccgcatgagtcgccgcctgaaggccggctcggtcttcgtcaacaactacaacgatggtgatatgaccgtcccgttcggcggctataagcagagcggcaacgggcgcgataaatcgctgcacgcgctggaaaaattcaccgaactgaaaaccgtctggattgctctggagtcttgatcatgactgaacataccactagctactacgccgccagcgccaataaatatgaaccgttcccgacgctggaggaatcaatcacctgtgatgtctgcgtcgtcggcggcggctacaccggcctctcctcggccctgcatctggccgaaatgggttacgacgtggtggtgctggaaggcgcgcgtatcggcttcggcgccagcggccgtaacggcggacagctggttaactcctatagccgcgatatcgacgttattgagaagaactacggcccggatgcggccaaaatgctcggcagcatgatgttcgaaggcggcgatattattcgcgagcgcattcagcgctaccagatccagtgcgattaccgcccaggcggcctgtttgtggccatgaaccataagcaaatggaaacgctggaagagcaaaaagccaactgggagcgctacggcaatacccaactggagctgctcgacagccatgccattcgtcgcgaagtagacagcgaccgctacgtcggcgccctgctcgaccacagcggcggccatattcacccgctgaacctcgccatcggcgaagcggacgccattcgtcttaacggcggccgggtgtatgagcagtcgccggtgacccgaattcagcacaccagcccggcggtagtcagtaccgctcgcggccaggtaaccgcgcgctacgtgatcgtcgccggtaacgcctatctcggcgacaagcttgaaccggagctggcaaaacgcagcatgccgtgcggcactcaggtcgtgacgaccgctccgctgtcggaggacttagcccgctcgctgatcccgaaaaactactgcgtggaagattgtaactacctgctggactactaccgccttaccggcgacaaccgcctgctgtacggcggcggcgtggtctacggcgcccgtgacccggacgacgtcgagcggctgattatgccgaagctgctgaaaaccttcccgcagctgcagggggtgaaaattgactaccgctggaccggcaacttcctgctgaccctgtcgcgtatgccgcaattcggccgtctcgataacaatatttactacatgcagggctacagcggccacggcgtaacctgcacccatctggccggacgcttgatttcagaactgctgcgcggcgatgccgagcgcttcgatgccttcgccaaactgccgcactacccgttcccgggcgggcgcagcctgcgaattccttttaccgccatgggcgccgcctactacagcctgcgcgaccgccttggggtctgatttgccgttcggttccgtgattaacttttgctaaagggtgtttattatgagcaacaatgaattccatcagcgtcgtctttccgctaccccgcgcggggtgggcgttatgtgcaacttctttgcccagagcgcgcaaaacgccaccttgaccgatgtcgagggcaatgaatatatcgatttcgccgccggtatcgcggtgctgaataccggccatcgccatccgcggatggtcgccgcggttgaacagcagctacagcaatttacccataccgcctatcagatcgtgccttatgaaagctatgtgtcgctggcggagaagctcaacgaactggcgccggtcaaaggcccggcaaaaaccgccttcttctctaccggcgcggaagcggtcgaaaacgcggtgaaaatcgcccgcgcccataccggacgcccgggcgttatcgccttcggcggcggtttccatggccgtacctatatgacgatggcgctaaccggtaaggtcgcgccgtacaaactgggcttcgggccgttccccggctcggtatatcacgtgccgtacccgtcagcgctgcacggcatcagcaccgccgattcgattaccgcccttgaacgcctgttcaaagccgatatcgaagccaaacaggtggcggcgattattttcgaaccggtacagggcgaaggcggctttaacgttgcgccgaaagagctggttgccgcggtacgccgcatctgcgatgagcacggcatcgtgatgattgccgatgaagtgcagagcggcttcgcccgtaccggcaaattgttcgccatggatcactatgccgataaaccggatctgatgacgatggccaaaagcctggcgggcggcatgccgctttccggcgtggtcggtaacgcgcagatcatggatgccccggcgccgggcggcttaggcggcacctacgccggcaacccgctggcggtggcggccgcgcatgcggtgctggatatcattgataacgaagcgctgtgcgagcgcgcccagttcctcggcgagcgcctgctggcgacgctacaggaagttaagggctggtgtccggcgctggtggaagcgcgcggcgtgggttcgatgatcgccgccgagttcttcgacccagagaccggcgaaccgtcggcggcgattgcgcagaaaatccagcagcaggcgctggagcagggcctgctgttattgacctgcggtcagtatggcaacgtcattcgcttcctctatccgttgaccatcccggatgcccaattctcccgcgcgctgacgattctgcagagcgtcactcgtctgtaacgccctccgccggcggcgctggtcgccggctgttttcctcgctgctgacgatacactgctggggatagtgttgctgaaaatagtggcgcagaaactccacggtggtgcgaattttggctgaggtcgccagccgcgacacgtagaccgcccagacgttggcgggctggaagtagtccggcagcacgtgcaccagatggccgctggcgatattttcactgacatcccaccatgaacgtaatgcaatcccctgcccatccagacaccactgatgcacgatttcaccatggttggaggagagcggcccggtcactttgatcgcgtgctggccctctttgctgtgcaattgccagacgccaaacggatggtcgcgctctttaatcaccagacagggcaaggtagccagatcgctaagctgcttcggttgcggatggcgggcaagaaactgcggcgacgcgcagagaatacggtggttggtcgccagcttgcgggcaatcagattcggcgcgatatcgtcgccgacgcgaatatcgagatccaccccttcattgactaaatccaccagccggtcctggacatcgaagcgcagctcaagttgtgggtactggcgcgccagcgccgacagcgccggcgccaccacccgacggccaaaaccaaagctgctgataatacgcagcgttccctgcggtacctgacgcacgtcggaaagctcgtccatcatctcatccacatcctgcagaatgcgctgcgcccattcgtagatccgctccccctcttcggtaatggtgacccgacgggtggtacggtgcagcaacatcacatgcagggtttgctccagcagcgaaacccgcttgctgacaaacgccggtgagacgccaagctcctcggcggcggcggcaaaaccggcccggcgagcgaccagcatgaacacgcgtaaatcatttagcagcggcagattattcatgatctgtgttttatgtttcaccagttagcgtgattaattatgaaccagtcaattataagataggcaggtggtcaaacatcatcgctaaaaagtgagaaccggaatgaaaaaaacctgtcgtattgccgccatccccggtgacggaattggtaaagaagttctgcctgaaggtattcgcgtgctgcaagccgccgcgcagcgttgggatctgtcgctgagcttcgagcagatggagtgggcaagctgcgaatattacgcccatcacggcaagatgatgccggacgactggcgcgagcagttgcagggcttcgatgctatctatttcggcgccgtcggctggccggataccgtccccgaccatatctcgctttgggggtcgctgctgaagttccgccgtgagttcgatcagtacgtcaacctgcgcccggtgcgcctgttccccggcgtcccctgtccgctggcaggtaaaaaggccggcgacatcgatttttacgtggtgcgcgaaaataccgaaggcgaatattccgccctcggcggccgcgccaatgaaggcaccgagcatgaagtggtgattcaggagtcggtcttcacccgccgcggcgttgaccgaatcctgcgctacgcctttgagctggcgcaaagccgcccgcgtaaaacgctgacctcagcaaccaaatctaacggccttgcgatcagcatgccctactgggatgagcgcgtggaagagatggccaaaagctatcctgaaattcgctgggacaagcagcatatcgatattctctgcgcccgcttcgtgctgcagccggaacgtttcgacgtggtcgtcggctccaatttgtttggcgatattctgtcggatctcggcccggcctgtaccggcactatcggtattgcgccgtcggctaacctgaacccagagcggaccttcccgtcgctgttcgaaccggttcacgggtcggcgccggatatctacggtaaaaatatcgccaacccgatagctaccgtttgggccggggcgatgatgctcgatttcctcggaaacggcgacgagcgctaccatgccgcgcacaacggcattctggcggcgatagagcaggtgatcgccagcgggccgaaaaccccggacatgaaaggcaacgcctcaacgcagcaggtcagcgacgctatctgtaaggccattttggcgtaattactccggccgccccccggtggcgctgcgcttaccggggctacaatggcacgctcatgtagatatcgcatcggtttgcaacggttttggtccgggaaaaacatgtgctttgtgttaattcagagcacattgcgctcccgatatttcttctgcgttatagctctcatggcgcagggagcgcacagagggcggccattcgccgccgccctctgtactcccgggctctggccgccaaaatcgccacttcgtggtaccttcgccttatccctgcaggcttcgggtcgggccgaggcagcgtccttgcaaaacacggccctcagcccgcatccatgcgggctgccccggccttccgggaacgtctcagcgattttgaggccaccaacaccagcagtttcagccagcgtggtgaataaataaaaggcaggtcgctcggaccgtagcccgggtaaggcgcagccgctacccgggaaaactcgcgccaactcccctctctcctctgaatgcagaaaaccccacgattgacaagtgaaccgcatcacagcggcgaactttattgattcctgaaaggaaagaacctgcgccaattcaccttttattatttccgttccgtgttttattgcttcacgaatcggccaattgtttaattcatgtaacgaagaaataatccaattgttaatagcattttgctacgaaccctgacccctacagcgtgataacaacgacaggctaaagccaccgacgggcaaccgtgcccaggagatcactcatgttgagcaacgtaaagagaaaagatgtgccgctgattgtcatcagcctggcggccattgttttcatcgccgctacattaagtctcttcccccaacaaaccgcccaggcggctaattcgatttttaacggcgttacccgcctgctgggttccgcggtacaggtgctggtgctgctggcgctgggactggtgttatatctggctaccagcaaatacggcaatatccggctcggcgaaggcaaagccgagtacagcactctctcatggctgtttatgtttatctgcgccggactcggctcctctacgctgtactggggtgttgccgagtgggcttattactaccagacccctggcctgaatattgcgccgcattcagcaaaagcgctggaatacagcatcccgtactctttcttccactggggcattagcgcgtgggcgacctacaccctcgcctcgctgatcatggcctatcacttccacgtgcggaaaaataaaggcctcagcctttccgggatcatttcggcgatcaccggcgttaatccgcagggcttttggggccgcctggtcgatctgatgttcctgattgccaccgtcggcgcgttaaccatttcgctggtagtcactgccgccaccttcacccgcggcctgtcagctctcaccggactgccggataacttcaccgtccaggcgtttgtgatcctgctctccggcggtattttctgcatgagttcgtggattggtatcaacaacggcctgcagcgtctgagcaaaatggtcggctggggggcgttcctgctgccgttggtggtattactgatcggcccgaccgaattcatcaccaataacatcatcaacgccatcggtctgacgagccaaaactttctgcagatgagcctgtttaccgacccgctcggcgacggcgcctttacccgcaactggaccgtcttctactggttgtggtggatctcctatacccctggggtggcgatgttcgtcacccgcgtctcccgcggccgtaagattaaagaggtgatctgggggcttatcctcggcagcaccgtcggctgctggttcttcttcggggtgatggaaagctatgccatgcatcagttcgtaaacggcgtgattaacgtgccgcaggtgatgcagtccctcggcggcgaaaccgccgtccaacaggtgctgatgtcgctgccggcgggcaagctgttcctcgccgcctatctgttcgtaatgatcgttttcctcgcttcgcacatggatgcggtggcttacaccatggcggcgaccagtacccgtaacctgcgcgaaggcgaggatccggatcgcggcatgcgcctgttctggtgcgtggtgataacccttatcccgctatcgattctgtttaccggcgcttcgctggaaaccatgaaaaccaccgtggtgctgaccgccttaccgttccttgccattttactgatcaagaccggcggcttcgtacgctggctaaaacaggactacgcccacgtgcctgtgcatcagatagaaacccatacgcccgagccgatcgttaaagccgagacgctgccggttggcgcggtactcaaaggcgacggccagtcgctgtaaaaaacgcttactgacaataatcacaaggtgaccctacatgagcaatttaagccctgactttaccctgccgattaacttttgtgccaatccacaggacgcctggaccattccggcccgtttttacaccgacagccaggcgtttgagcacgagaaagagcgtatcttcgccaatagctggatttgcgtcgcccacggcagcgaagtcgccaggccgaacgattacattacccgagagatcatcggcgaaaatatcgttatcgtccgcgggcgcgacaacattctgcgcgccttctataacgtctgcccgcaccgcggccaccagttgctgagcggcgagggtaaagccaaaaacgtgattacctgcccctatcacgcctgggccttcaagctggacggcaatctcgcccacgcccgcaactgcgaaaacgtggcgaatttcgatagcgataaggcaacgcttgtgccggttcgccttgaagagtatgccggctttgtgtttatcaatatgaacccgcaagcggagagcgtggaaacgcagctaccggggctgcaggacaaagtgctggaagcctgcccggatgttcatgagctgaaactggcggcgcgctttaccactcttaccccggcgaactggaaaaatatcgtcgataactatctggaatgttaccactgcggcccggcgcacccgggcttctcggattccgtgcaggttgaccgttactggcacaccatgcacggcaaatggacgctgcagtatggcttcgccaaaccctccgagcagtcgtttaaattcgaagaaggcaccgacgccgcgttccacggtttctggctgtggccgtgcaccatgctcaacgtcacgccgatcaagggcatgatgactgtcatttatgaattcccggtggatgaagagaccaccctgcagaattacgacatctatttcaccaacgaagagctgaccgacgagcagaaagcgctgattgagtggtatcgcgacgtgttccgcccggaagatttgcgtctggtggaaagcgtgcagaaagggctgaagtcccgcggctatcgcggccagggacggattatggcggataacagcggcagcgggatctccgagcacgggatcgcccatttccacaatctggtcgcccaggtattccagccgtaatcgttgaaggagttagccatgtccgtatttcactctgatctgtttcgccagcaggcgctgattgccggaagctggcgcgacgccgccgacggtacatcgcttgccgtcagcaatccctccaccggcgcgacgctcggccaaatccccaatatgggacgagcggaagcgcagcaggcggtggatgccgctactgccgcgcttccggcatggcgcgcgcttaccgccgcccagcgcgccgcgttattgaagaactggcaccacctgatcctcgaaaacaagaccgcgctggcgcagataatgaccgccgagcagggcaagccgctggcggaagcggaaggcgaaatcgcctatgccgcctcgtttatcgagtggtttgccgaacaagggaaacgcgccaacggcgaaataatcccctcccccggcgccgataaacgcctgatggtgatccgccagggcgtgggggtctgcgcggcgatcaccccgtggaacttcccggcggcgatgatcacccgtaaggccggcccggcgctggccgcgggttgtacgatggtaattaagcctgccaatgaaacgccgtttaccgcgctggcgatggcggaactggcgaatcaggccgggatcccgcagggcgtcattaacgttgtcaccggccagtcgcgtgagattggcgcggtgttcaccggcgatgagcgggtgcgtaagctctcctttaccggctcgaccgaagtcggccgcgtgctgatgcgccagtgcgcggaatccatcaaaaagctctctttagagctcggcggtaacgcgccgtttatcgtctttgacgacgccgatatcgataaagcggtcgagggggcgctgatcgccaagttccgcaacgccgggcaaacctgcgtctgcgtcaaccgtttctatattcatcgcgccgtctacgaccaattctgcgacaagttcgtcgcccgcgtcgccgccttgaaagtcggcgatggcagcgagtccgatgtccagattggcccgcttatcaacgccgacgccggacgcaaagtccagtccctgctcgacgacgcgctcacccgcggcgcgacgctgttaaccggcggtaaagcgcatccgctgggcggtaatttcttcacccctacggtgatcggcgacgtacagccggggtcactgctgctgcaggaagagattttcggcccggtggccgcgctggtgaaatttgaggatgagcaagaggtcattgagcaggcgaataacaccatctacggtctcgcctcctatttttacagcaacgatgccgcccgtatctggcgcgtctccgagcaactggaatacggcatggtcggcatcaataccgggctgatttccaacgaagtcgcgccatttggcggagtgaaacagtcgggtcttggccgcgaaggctcggaacacggaatcgaagattacctggagatgaagtatctctgccaggggttgtaaatatcctctcccggcgacggcactggtcacgccgggattttttgatggagttccgcgatgtctgattatcaaatgtttgagacgatcgttcgcgatgttgaacagatcaccgcccaggttaagcgttttacgctggtgtcgccgaccggcgccccgctgccgggattcagcggcggtagccatattatcgtccagatgcaggatggcgatcagcgttacagcaatgcctattcgctcatgagctcaccgctggataccaccagctggcagattgcggtgcgtcttgagtcgccttctaaaggcggctcgcgttttatgcatcagcaggtgcgaccgggcgataccctgacggtatccacccccaacaacctgttcgccatcgaaccacaggcgcgaaaacatctgctgatcgccggcggtatcggcatcacgccattcttgtcgcatattccggaactggaacaacagcaggccgactggcagctgcactactgtttccacgacgctgacaataatgctttcgtcgatgcgctcagcgccgcgccgtggcgcgaccgggtcgatattcacatatcagcgctcggcagccgtctcgacctgtcgcgcctgttcgccgatatcgaacccggcacccacatctatacctgcggcccggcagcgcttaacgaggcggtgaaagccgccgccgaacggtatcaggttcccgccagccagctgcactttgagcaatttatcgttgaagataaaggcggagaggcatttaccctggtgctggcgcgttccggacgcgaatttaccgtgccgcaggagatgaccattttgcaggtgatcgagaataacaaagcggcgaaggtggaatgtctgtgccgcgaaggggtgtgcggcacctgcgaaacgatgattctggagggcgaagccgaccaccgcgatcagtattacagcgatgaagagaaagccagccagcagagtatgctgatctgctgctcacgcgctaaaggcggccggttagtgctggatttatagctcgctctccggccagcggcgctggccggagagacaatcacagttccagctcgcaccgcaataagaatggactgaccccgcggaaatattccaacgacctaccactccatggcgacgagatcagtggcgcggatactaaagccttcgctggtagtgtaattagcacaatgtgctacatcagcagctaattaacgcatctccgcgccaaatcaatttttatcccggctgaacgttcagcttttcaccgctatgcgcaaaatatccgcgcctgaccaataacgtccaggcgaaccgcggcgccagcttgccaggcggcttggctgacggttttcagcaccagcggcatcgattgccccgccgcgctcacggtcagcgtcgagatatggccggcgaaatcgacatccacgatgcgaaaggcgctctcctgcggcgcgcacgacgacacccgcagttgttccgggcgcaacatcacgcgtccgcggccgttggcgtgaggatcgtcggtcggcaactcgccgatggcgcaacgggcgcgcccttccatgagctcggcgtcgagcaccagcgcatcgccaagaaacagcgcggtggcctcgtcaaccggacgcgagtagacctcgaacggcgtccctacctgagcgaaacgcccctgccgcatcaccgcgacctggcttgcaaacgacagcgcctccgtctggtcgtgagtgaccaggatcgaggctacgccagcctcggccagcagatcggcggtggctttgcgcgtcgccgcccgcagcccggtatccagcgccgagaaaggttcatccagcaacatcagggatggccgctgggccaacgcgcgcgccagcgcaacccgctgctgctggccgccggaaatttcatgcggccagtggctcgctaatgtcgcatctaacgccaccatctccatcagtgcggccacccgacggcgtttctcttcgcgactgcaatcgagtccccaggcaatattgtccgcgacgttaagatgggggaacagcgccccttcctgcggcacgaaaccgatcccgcgctgatgcgccggcacaaacacgccttcggcaaacagggtgttgccctgcagaacgattcgcccgttatccggggtttcaaaaccggcaagaatccgcagcagcgtggttttaccggaacccgacgggccgacaatggcggtacggcttcccggcgccacggtcagattaaggttatcgagcaccagcgcgtcggcgaaagatttcgagatagaagacaattccagcatgttacaaccctgcaatttttttcgactgcacataaagaaccgccgtcagcggcagcgaaatcacgatcatcagcatcgcatagggcgctgcggcgacgtagtcgatctcgctggtcagcgcccaaaaaccggtcgacagcgtacgggtgcctaacggcgatagcagcaacgtcgcggtgagctcgttgctcacgccaagaaacaccagcgcggcgccagcggccgctcccggcgcggccagccgcatggtgacgctccataaggcgcgggccgggctgcgcccaaggctacgggcgacattttccagctcaaccggcgcctgggcgataccggcgcgcaggttaatcaacgctcgcggcataaacatcagcaggtacgcaaggaacagggtcacctcggtctggtacaccggacgggcatagtggatggtgaccgtcaccagcgccagcgcggtgacgatacccggcagtgagctggtgatgtaattacagccttccagcaggcgaaacagccggcgcggataacgcacgccgagccaggcgataggaatcgcgcaggcggtggtcagcagcgcgccgcccgctcccagtagcagggtctggcgcagcgaatgccaaagatcggcatgcagccagttctccaccccgccaagccataaccagcggcacagcaccagcagcgggacgcccatcgccagcatcaccagcgtcaacagcagcagttgcgcgccccatgcggccacattacccaacggacgacgcttctgttcgcgcgccgcgccggcgccgatacgcgcgtaacgcgctttgccgcgcgagacgctctccagtagcagaatcgccagacaacacagcgccagcacccccgccagcatattcgccgccgggccgctaaaggtggactggaactggtcataaatggcggtggtaaaggtatcgaagcgaatcatcacatacaggccatattccgccagcagatgcagcgccaccagcagcgcgccgccgcagatagccaaccgcagctgcggcagcaccacgcggaagaaaaccttccacggcggcgtacccaacgaggcggcaacatcttccagcgttggatcgagacgacggagcaccgccgccaccggcatgtagataaagggatagtaggccagcaccgagaggaacaccccggcggacaggccgtgcagcgagggaaccgcactgacccaggcatagctctggacaaatgccgggatagccagcggcgcgaccgccagcgccgaccatagctgacgcccggcaagcgcggtgcgttcagtgagccaggccaccgccacgcccagtgcgatagagatgggcaccgccagcagcgtcagccacagcgtattgctcagcagttcagctacccgcgggcgaaacaccagtgctttaatggtcggccagccggtctcaatccccaccgcggccacaaaacctaacggcagtaacgccattattgaaaacagtacagctaaggcaaccatcggaaatgcaggacgcctgcgctcgggcaggcgtcctgttttctttccgagtaccagactcaggacagacatagataaatcacttcagcatcaaattacagcaggccagcctgggtcatcaggtcgatcacttttttgctattcagcgttgacggctctaccttcggcgcgtccagctctttcagcggcgtcagtttcgggttagaggcggcattcacgcccaccgcatattcgaaagcattattggtacgcagctcatcctgaccctgcttgccggtgatccatttgataaacgcctgcgcctgctctttatgtttgctggacaccagtacgccgccgccggagatactcacgaaagcgcccgggtcctggtttttaaagtaatacagcctggtgtttttgctgttctcgccggttttcgcctggtcgacaaagcggtaatagtggtagatcaccccgccgtcgatttgaccggcgttgaccgctttcattaccgtgctgttgcctttgtaggctacgaagttcgttttcatcgccttcagccagtcgagcgtcgctttttcgcccttcaacgccagcatggcgctaacgatggcctggaagtctgcgcccgatggagaggcggcccagcgccctttccactcaggtttcgccaggtccatcagcgaatgcggcagctgagattcgctgattttcgccgggttatagacgaaaacggtgctgcgggcagcaatgccaatccagcggccgtgctcaggacgatactgcggcgcgacctgattcagcgtcacggcatccagcggcgcaaacagtttggcattatcaaccaacaccattgaaggtgagttttcggtcaggaagacatccgccggcgaggctgacccctcctgcaccagttgattacccaattcgctatcgtcgccgttgcgcagcgtgactttaataccggtttctttggtaaagccgtcaacccaggatttcaccaggttttcatgctgggcgttatacaccacaatgccgtcgccattgtcagcagccataacctgcggagcggtaaacagagccgaagcagcgagcatcgccgcgcaatatgccgataagcggaaattcataagctaatccttagtatgggtagtcgaaaagccgtggagaaaccgggttggcacggattaaatcacagaggaatgtgaatgataatgaaaacaattaccatcattttaaaaaagtgaaaaacaccgccaattagaatttcctgatgacaaaatgcttatttcaacgcgcgaccgaaacaaacattaagacaacattaagccagcagatttaaatattatcgctgtttaaaatcttgatcgtcttcacagattctctccgcgacacagcaacggccagctgcttaccgggtgaaatcatcacccttgccaataattttaaatgagaatgatcttgataatcattctcaatatcacatatcatcctgttccagcagcaagatacgaagaaaagacgactaaaaagccgaaaatggatattttatgtttaaggacccccttttaaagactctggttataggctgcgcgtggttactgagcgcctgtcacagcccggtttatcccctctctcctgccggggagcacgcgctggtagagaaggcgaatattcgtgataccgccagcgggcgcaccctgacgccgcaacaattgctgaaccaactcgcccaggcgccgctggttattgttggcgaagaacataccaacgctcagcatcaccagattgagcgctggctgctgcagaacctccacacccttcgcccgcagggtagcgtgctgatggagatgatcgacctaagccagcaggaggcagtcaatcgggtcaagcgggccagcctcagcgggacgaccgtgagcgccactcgcgcggcggaaaccctgcgctggaacccaggctggccgtgggcgctttatcgcgacgtcgtgatgaccgcgctgcaagcaccttatccactgctggcagccaaccttagccgccagcaggtgagcgatatctatcagcatcccacgtttccccgcggaatgctctccaacagcccgcaggtacatgaatcgctatcggccattatctatctgatgcataacgggcaaatcgatggcgagcaggtcacctctatgctcgctattcagcagcagcgcgatcgcctgatggcgacgcaaatgcaagccgcgccgcgcccggcgctgctgattgccggcggctatcatgcggctaaagatattggcgtaccgctgcatctggccgatctcaaggcggaaaaaccgctggtgttactgctgaccaccgacggcgccacgctgacggcgaagcaggctgattacatctggtcggtggcggcggaaaaatgaatatccctctctccacgccattgatagcgtcgcatccccgctggttcacgggaacaacggccagcgtgctgggtcatctggcgctggcggtgccttttatcattcatttcgcctcgccgccggatgtcgcgccccctgccgcggtgatggtggagtacgcgccggaactggaagtgtcatttattcaccccgagctgccgccgggcgtcacccagcagcgcaaagtcgaggcgatgaccgagcaggaaacagcagcggtgaaagaggcgccgaagctacatattcacgacaatgcgcaaataaagctctccgccagcaaacccgaaccgcagcggaaaaagaaaatcgaggttaaaaaacagtcccgccgccagcagcaagaggaaaagggcaattcaaccatcaccagcttcgctgcgcccccggcgccggccgtcctcactcagcgcaccaccgcgccgctcgatagcgatgccgcgcgcctgagcgacaacaagatcagttgggaatcgctggtgaaaggcaaaatcaacaaaatgcgccactacccggaagatgcgcgccgccgtaaacgtaccggtaccgtcattattaccttcagcgtcaacgaacgcggcgaggtgttgcaatcgcagctggcgaactcgtcagggacccattcgctggatcgcgccgcgctgatggcgctggaaaatgcgcgtccgcttccgccgccgccaaaagagctgctgcgtaacggcataaataaggtcaccctgccggtagagttcggcttattaaaaatataaatccagggttccctgttatttattcaggcaatctggacgttatttatcacggtcactgaccgctaataattttttattttgggcaatgtgtcatcgcacttagcaataagcgcgatgcacgctgctgccctttttgtgcgttaactatttattacctcaggattggattatggaaaaatcacaaataatcaccgggctcgttaccgggctacttatcgtcaacggccaggctttcgccgccgaaagcgaaggggaatcggtgttctctcccatcaccattaccgataacccgctggcggaaaataccggccaggtcggctcctcagaggagagctatacccgtcccggcgcctacagttcgcgaacgctcaataagaatctgcaaagcctcgatgcctcgctgcgcagcatggcgggcacctatacgcaaatcgacccgctgcagggcaccatcagcgtcaatattcgcggcatgaacgggctgggccgggtaaacaccatggtcgatggcgtcacccagaccttcttcggcatggcgccagctaactaccacggcggggcgaataccgccgccggagtaccgcttgaccccaacttcctggccgaagtggatatcacccgcggcaacagcgccggttcgcaaggcgtcaacgcgctggcgggcagcgccaatctgcgcacgatcggcatcgatgatgtgttaaaaccggggcatcaggtcggcctgctgtcgcgtttttccgtgggcgataacggactcggccgcaccggtatggtaacggtagccggcaaaaccgacaccttcgataacggcggcggccttggcgcgctactcggcatcagcggcacccgcacctatgcgacctataaaaacggcggcggacgcagcagcgaagagtttatcggcgaggataataaatatttgcgtcaggagccgcgctcgcagctatataaaatcaatttcgacgtcgatcaatttaaccgcttcgagttttccgggcgtaattaccgcaatagttttacccgtcgcgatattagcagcgacgactactatctgcgctataactacgcgccgctcaatgaactggtcgagttcaatgtattagccagcaccagccgcggcaatcaggcatataaaccggagtcgctgtataattttaatgactcctcgaccaccaataagtccaacgcgctggacatgaacaacaccagccgttttcgtattaccgacgatctgtatgccgctttccagctcggcggcaaattaatggacaccagctattcccgccgcttcgtgcaggataccgagaccgaccacaacgccttcgccccggcaggcaagcagaagatcgcctcgctctatagcgggctgacattaaacaaggatatttatcagctcgatcttaatctcaactatacccgcagccgggtacagggctataaaccggcctgtgcagataacgaaaaatgcttcccgcaaggggcaacccaactcaacgtcaaagataacggttttaatccctcggcgaccttctccgctcaggtgacgccatggctgcagccgtttgtcagttggagccgttcctcgcgggcgccgaacgttcaggaagtgttcttcgccaacgagggcggcgcatcgatgaatccgttcctgaagccggaaaaagccgagacctgggaggccggttttaacgttatcaaacaaggattattgagcgagcaggatagtctgcatctgaaagctctgacctaccgctcgcggattaaagattacatcaccagcgaatccttcctgctgtgcagcaacggcgggctgtgtaaagatgtcgccaatgcttcgccggatttcaacgccaacatctcggttaacgtgacctcgccggtgaccaccgagggctatgagattgaagccggatacgacatcggttttgcctacgccaatgtgtcatggagcaagcagcgtaccgatcagcccacctctattgccagcacggtctatagcttcgcctacagcgacctgagcgatcttcccagcagctacgccacggtggatgtcggcgggcgcctgttcgatcgcaaactcaccgtcggcagcctggtgaaattcaccggtaaatcaaaacgcctgagtaccgaaggcattagcctcgacaccaatacggtgcctaaagagggcatgccgaatatcccgaccattatcgacctctatagcagctggcagatgaccgataacgtgctgctgcgctttagcgtgcagaacgtaacgaatcgtgactactccgaagcgctaaaccgtatgaaccagagtctcgataacgccaaagagggcgcgtctgttaacaccaccgcccgcggccgcacctatattttcggcggcgaaatccagttctgagccctatttgtcaacaaggataaccatcatgcctaatcgcaacttgataaaaccgctggctgcgctactgctcgccgccctgctcccccaccccgctttcgccatcgatccgccgccgcgggaagcgtcgcgctttgcgatgaaaaccaattacctgcaggaagccaacgaaggggtttatgagctggcgttcgacaacggcgacaacctgctattcgccgcggccaccgaccgggttaaccgcgcggccaataaaggttatctttacgcctttaatccggccaccctgcaggttatccagcgctatgatatgccctggcgcgccttctcgctggcgatgaatcagccggcgcacgtgctttatgtcggccatacccagtcggcttcgctgcgtatcagccagttcgacgccgccagcggtaaaatcacccgcaccagtccgcgcctgagcttcccaaccgacggcgccgccgatgcgcgcttcgaacatctgcggcatatggtatacagccgctccgctaatctgttgtttgtcagctacagccatatgctgaaaacccaggacgggatgcgccctctgcataaattgttgatgctcgacggcacgacgttgcagctgaaaggggaagtcaaaggcgcctatcgcggcaccgcctacggcctgacgctggatgaaaagacgcagaagatctacgttggcggccgcgactatatcaacgagatcgatgccagaacccagcaggttgtccgcactatcccgcttaacgcgccgcagttggccagcgcgcaaaacctgatcgtcgattccgactcagggcgtattttcgtggtcgccttcgatcacgacgatcgcagcggcccgcacgacggcctgtatattttcgatctgaaagacggcaaatcgctgggttacgtgcgtaccggagtgggcgccaacgcggtgcgcttcaatccgaaatataacgagctgtacgtcagcaatttcaccagcggcaccatcagcgtcgtggatggcaaaacctggcgggtgactcatgaattccgcgccccggtttatccgaatcaaatggtgctgtcgccggacatggataccctgtacgtcggcattaaagaagggttcaatcgcgagtgggatcctgaggtatttgtcgaaggggcgaaggagcgcattctgcgcattgatttgcgtaaatcgtaatccgctaaccacctgtccggcaggtggttattagccttcgttggccagcttcgcgcgcaggcgcttaatcgcctggctgtgtagctggctgacgcgggattcccccacctccagcaccgcgccgatctctttaaggttgagctcttcctggtagtagagggtaaggaccattttttcgcgttccggcaaggcttcaatggcctcgatgacccgctggcgcaggctgccttccagcagatgatgcaacggattggcctcttcgtgcccttccagcagtcgttcggcattctcgccctgttcttcccgccattcgtcataggagaacagctggctgttattggtatccagcaggatttgtcggtactcggcaagggtgatacccagcctctgcgcaagttcgctttccgtggccgggcggcccagatgctgttccagcttctgcatcgcctgggcgacttcgcgggcgttacgccgtacgctgcgcggcacccagtcgcggctacgcagttcatcgagcattgcgccgcggatacgttgcaccgcataggtggtaaaggccgttccctgtagcgagtcgtaacgctcgatggcgttcaacaacccgattcccccggcctgcaataaatcgtcaagctcgacgctggcgggcagcctgacctgcaggcgcaacgcttcgtgccgcactaacggaacgtagcgcagccagagggaatttttgtccatcacgccttcggcggtatacaaatcgctcactatttctgaaacctgcggataagagagtcagcgctattatgcgcaggggcaaaaatgccaatcgccggaaaaaccgcataaaagcgtctctatttacgacatgctttctcattcagccgttttgccaggcggctacgggcaaaaagtaaaaaccccgccgaagcggggttgcgatgcgacagtaatcagacgtgcgattaacgcagcagagacaggacgttctgagtcgactggttagcctgcgccagcacggaggtacccgcctgctgcaggatgttcgcgcggctcatgttggacacttcggtcgcgtagtcagcatcctgaatacgggactgggacgcggacaggttgttcacggtgctgttcaggttgttgataacagaatcgaaacggttctgtaccgcacccagggaggagcgcagttggtcaacctgggacagggctttgtcgagggtagccagcggatcggcagttttttctgtggtttgcagttgatcgccttttaccactttacccgttttttcatcaacggtagctttatagtacgctgtgttaccgtctttatcttttccttcaattgcataaccatctttattacctttggcatcggtaaatgtatgcaatttttcatttgctgctaaaccggttacgcttactccaccacttgccgggatggtaactttatctacgacactttcagtaccacttactgtgtattcagcaccagtcgtgtcaaaagtatactctccagtatcggcgtcaagtttcgcttcataagtcttaccgccatccttaacatagtatttattgtcatctttatacagtttgccatctgtagttcctgtcccgttagcagtaacaggaatatctttcgctgcagtgccacccactttatcaatatcagcagtaccaatctgagtcgccgcatcaatcggattagccacgctgaacttatccagacccagagtcttcgcattgatatctttcagatcgatatcgatggtttcgccgtcgttggcgccgacctggatggtcagcttctggtcgccgctcaggactttaacgccgttgaaatcggtctgttcggagatacggttgatttcagacagacgctgggagatttcatcctggatagactgcaggtcgcttgcggagttggagccgttctgcgattgtacggtcagacgacggatattctgcaggttatcgttgacttcgttcagcgcgccttcggtggtctgcgccagggagataccgtcgttagcgttacgggaagcctgagtcaggcctttgatgttagcggtgaaacggttggagatcgcctgacccgcggcatcgtccttggcgctgttgatgcgcagaccggaagacagacgctcaatcgccgtgcccagggaagactgggatttgttcaggttattttgcgccatcagcgacaggctgttggtattaattacttgtgccattatatgcattccttacgagtcagttgcgttctgtgcaacgtggttaaaaggttcgggcttgcttgcccacggcgtcaaccaccgtcccttctggtatcgacgtatcctctgcaacctttagccattttttgaaaaatttttgcccctccgccaatggcgaaaataacgcgctttttccctcttctattacgccatcgcctttttcactttttcggtaaactttttctccactgggccgataacgcaataagcgaataacgtcattagtaaggagaaacaccaatggcatcgatcagttccttaggcatcggctcaggactcgacctcaacggtttactggacaaactcagcaaggcggaacaacagcgcctgacgccgtataccactcagcaaaccagctataacgcgcagctaacggcttacggcacgttaaaaagctcgctggaaaaattcgataacctgagcaaggagctggccaagccggagtttttcaacagcaccaccgccaccaagcacgaccagttcaccatcaccaccaccaataaggcggtgccgggcaactatagcgttgaagtgcagaagctggcgcagccgcaaaccctgaccacccaggcgacgattaccgaccaacaagagaaacttggaaccgccggcaacagcgaccgctctattacgatcaccgccggcgacccgccaaaagagaccacgattccgctgagcgacgaccagacctcgctgctggagatgcgcgatgccatcaacggcgctaaagccggcgtcaccgccagcatcatgcgcgtcggcgacaatgactatcagctggcgctgagctcctccaccaccggcgagaaaaacaccgtgtcggtgcaggtgaataacgacgataagctcggcgccatcctcaactacgacagcagcagcaacagcggcgcgatgaagcagaccgtcgccgggcaggatgcggagatcgtcgtcaacggcaccaaaattaagcgcagcaccaactcgattgccgatgcgctgcagggcgtcaccatcgacctgaaaaccaccaccaaagccggcgaaccgcaaaacctggtgatcggcatcgataaaagcggcaccgccgacaaaatcaaagagtgggtggataattataattcgctgctcgacaccttcggctcgctgaccaaatataccccggtgaaaagcggtgaagcgcaaagcgccaagaacggcgcgctgctcggcgataacaccctgcgcggcattcagtcgtcgattaaaagcgcgctcagcgccgctcaggacaacccggagctgaaaggccttggtaacctcgggatctctaccaatcccaaaaccggcaagcttgaagtcgacagcaccaagctcaataaagcgctcgacgagaaaccggatcaggtcgccaacttcttcgccggcaacggtaaagacaccgggatggccaccgaaatccataatgaaatccagaactatattaaagcgggcggcatcatcgagaactcgaccaaaagcatcaacaccaatctcgatcgcctgaatgtccagatcgacaccgtttccgatagcatccagaacactatcgatcgctataaacaacagtttgttcagttggataccatgatgtctaagctgagcagcacgggtaactacttacaacagcagttctcgtcccagtaacccttaatcaggtaatgaaacagcatgtataaccgtagcggcacgcaagcctacgcacaggtcagtctggaaagcagcgcgatgagcgccagtccgcaccagttaatcgtaatgttgttcgacggggcgcttaacgccctgcttcgcgcacgcatcctgatgaatcagggggatatcgccggtaaaggcctggcgctgtcgaaggcaatcaacatcatcgacaacgggttgaaaagcggcctcgaccaccagcaaggcggcgaaatcgccgataatctggcggcgctgtacgattatatgaagcgacgcctgatgcaggccaacctgtataatgacgaagcggcgatcgtcgaagtggtcaagctgctggagaatatcgccgatgcctggcggcaaattggaccaaactatcaacctgctcagggtacattgtgatggaacgccaacagcagcttttagccgcctatcagcagatccataccctgagcagccagatgattgccctggcgcgcgccgggcaatgggaagcgctggtggaaatgcagtttgcctacgtgacggcggttgagaaaaccgccgaatttaccggcaaagcggggccatcgctggctctgcaagagatgctcaacgctaagttgaaacagataatcgacaacgaaggggtattgaaagggctcttgcagcagcggatggagcaattaaaaacgctgatcgatcaatccactcgccagaacgcggtcaacaccgcttacggccagttcgacgatcgctcgctcctgcttggcgaactgcagtccgataacgtggtcgccattaagagcaaaagcgaagaattacaataacaacaaccttacagcctgatattccggccaggaagcgcatgatggggctagccagggcaatgctgagtgttgcctggtaagccatcggcgggttttacaggagtgaataagcaataatatataatcaattattttatttacgcttcatacattcatcaattaaatattctaaacatcgcaccagctaaaataagccactcacaggcttagggaaatatgcctgtaaaataatccgtgttatcttgaccgggttaatctgatatttgtcacgaggataaaatatggatgtattcctctggaaatgagcgcccctgcgttggctcttaaaggtgtttaatcaacagtaaaaggaatacaaacaggcaataccatatatgaaattgataataagtaatcactcgattttcaagtagataagatatgcttaaaagccatctggaaaggtgttaatttccaaacagcaatcaggataaaaataatgattagcggataagtaaaatcattactttcgaagttaaaaatccacgaaacgactatggcaaaggcaatacaaacaacaataacgccgccccaaaaacgttttcgtaaactgtcgatcaaagtagcataggtttcattgttactttcttgtcgcgtcaggatttcgcgcaggcgggcaatctctttatcggtgaagccatgttcacgaagatcatcttctgttagctgctttcccacgccaggtccctccatgcttgttatatatttctccaacgttatcgactgaagatactcgttatatcgctcagccaaaacggtaaaagggatacaggttggtaacacgatgtatgaagttaaagataaatgactatcttatttttagatacaatttgtatgctttgagcgccattggaaacggagttagtttgtaaactaccgagaaaccgaataataaaatgaaaaaataggcaaaatgattaattgactcataattataacaccaatgaatgagcactataaaaacaataaaaaaacctaagactccagcccaaagtcttttgcgaagttcatcgattaaatcaaaatagcttttgttttggctttcttgccgcgtcaggatttcgcgcaggcgggcaatctctttatcggtgaagccatgttcacgaagatcatcttctgttagctgctttcccacgccaggttcctccatgctggttatatatttctccaaagtttccgactgaagatacccgttatatcgctcaaccaattgctcaggtgtcatgcagacagccgggtttaccacagtccgtggaatattgcccctgaagttgccaggggtcaagcgcgcgcgtttatgccatacaacgatttcacgcctgagccgccagaatgcggtcagtttaaaagagatgcgttacgctaccgccccgccttcatcttcccaacggcagaccatgtggtacatttcccgctcgtcgtattcatcgtggaatctattcacaacaccctccagaagaccgttagccatgctctaagtttagtcactgttaaggagggagacagatcagaggaagttgaaacggcggttactcgctatcctgtcgccaggtttcatgaaacatcgctatcgcgacaaaagctaaaacgacaaaaaatacaacggtctgaagccacagcataacgcctccgcggagcaaaatttgcgcagattatttgccaccaggccggaaaacgatagtgaattgccatccaaatttaaattttcacctttcgccgataatacaaagcagatctttcttgtacctgacggggatatactaaataacagtagaaacttttggcgctaagccaacgctaaggtaacaatcgtcgcaatggttccccaaaagatcaacaaaccgagaaaaatcccaatccataccttacgccgcaactgatagtctacttttccggacatctgctattccaaattagaattattttggcaagaccatacagtttgtagtgctagtagtcagatcgtttgtgtcgatcgatgaacggctattgatctgtatcccctatcaactgtaatgataatttcggatcactcattcaccagtcgatgggtcaaaatcaatgcagaggcgagcagttttttgccgttgtcgccgtaaatagacaaaaccgccagcgttagcatagcggtttgcaggaagcaattgcgccgggattgtatgactaaaccggcatattcataatgtcctgataggccgccaccagcttattgcgcacctgcacgcccatctgcaacgaaaccgatgatttctgtaaatcgaccatcacatcattcaggctgatgcccggcacgcccagctcgaagttttgcgcctgttgacgcgcggcctgctgggtatcgctgattttacccagcgcggcggtcaattcactggcaaaactgactccctgcggtacgctattctgcccgttatttcccgcctgaatcgccatcgcctgcatctgttgcagtacgccttcaataccctgaatcgccatcttttcctcaatactgtcgtgatcgccaggcgctatttcaccctgtacttctccaatgctgcacaccctaacacagcgatttttgcttaaagcggttaattagccgcaaaaaacccggcttatcgggcaatcagaatcatctgataagaagaataatggcctgcccagaaatgggagcgccgctattgagaaaagatgtgtatcagggagtctgttttgtcacataacgctatccataccgttcgtcagcacgccagcgcgcgtcgccgcctgaacgccagcgaaggataccgccaaccatgagtgcctcgttatccgccggcgaaagccgcgacaacggcctgcaggccatctggagccgtctgcgcgccaatccaaaaattccgctgctggtggccgcctccgccgctatcgccattatcgtcgcgctgctgctgtgggcgaaaagcccggattatcgcgtgctgtacagcaatctaaacgatcgcgacggcggcgctatcgtcacccaactgacgcagatgaacatcccctaccgcttcgccgagaatggcgcggcgctgatgatcccggcggagaaagtgcatgaaacccgtctgcgtctggcgcagcaggggctgccgaagggcggcgccgttggcttcgaactgctggatcaggaaaaattcggcatcagccagttcagcgaacagattaactatcagcgcgctcttgaaggcgaactctcacgcactatcgaatcgctggggccggtgcagaatgcgcgggtgcacctggcgctgccgaagccctcgctgttcgtccgcgagcaaaagtccccttccgcttctgtcaccctgacgctgcagccgggccgtgcgctggatgatggccaaatcaacgctatcgtctatatggtatcgagtagcgtcgccggcctgccggctggcaacgtcaccgtggtcgatcaggccggacgcctgctgacgcagtctgacggcaccgggcgcgacctcaacgcctcgcagttgaaatatgccagcgaagtggaaagcggctatcagcgacgcattgaaacgatcctggcgccggtggtcggcagcgccaacgttcgtgctcaggtgaccgcacagatcgatttcgcctcccgcgagcagaccgacgaacagtaccagccgaaccagcagcccgataaagcggcgatccgttcgcagcaaaccagcagcaacgagcaaatcggcggaccgcaggtgggcggtgttcctggggcgttatccaaccagccgagcgcgccggccaccgcgccgattgaaaccgctaaaccggcggccaataacgccagcaacgcgaccaacacccgtagcgccgcggccaacagcggcccgttaagcacccgacgcgacgccaccaccaactacgaactcgatcgcaccatccgccatacccaacaaaaagccgggacggtggagcgcctgtcggtcgccgtggtggtgaactactgcctcaacgccgacggtaaagcgcagccgatgagtaaagaacaactggcgcagattgaagcgctggtgcgcgaagcgatgggctactccagcagccgcggcgatagcctgcaggtggtcaatacgccatttaccgacaatcagatgaccggcggcgagctgccgttctggcagagccaggcgtttatcgatttgctgctcgaactgggacgttatctgctggtactgctggtcggctgggtattgtggcgcaagctgattaagccacagctgcagcagcgtcaggccgcacagcaagccgcggtcgccgccgccagcgcgccggtcgctaaagcgaacgacagccataaaccaagcaatgaggagctggcgctgcgccgtaaatcgcagcagcgcgtcagcgcagaagtccagagccagcgcatccgcgaactggcggataaagatccgcgggtcgtcgctctggtaatccgccaatggatgagtaacgaactatgagcctgaccggaaccgataaaagcgccattttactgatgacgctgggcgaagaccgcgcggcggaggtgctcaagcacctatcctcccgcgaagtccagcttttgagcggcaccatggccggcatgagccaggtctcgcataaacagctcggcgagatcctgtctgaatttgaagacgatgccgaacagttcgccgccctgagcgttaacgccagcgactacctgcgatcggtgctggtgaaagcgctgggcgaagagcgtgccgccagcctgctggaggatatcctcgaatcccgcgaaaccacctccgggatggagacgctcaactttatggagccgcagagcgccgccgacctgatccgcgatgaacacccgcagatcatcgccaccatcctggtccatctcaagcgcggccaggcggctgatattctggcgcagttcgatgagcgcctgcgcaacgacgtgatgctgcgtatcgccaccttcggcggcgtgcagccggcggcgctggcggagttgaccgaagtactcaacaacctgctcgacggccagaacctcaagcgcagcaaaatgggcggagtgcgtaccgccgccgagattatcaacctgatgaaaacccagcaggaagaagccgttatcgacgcgatgcgcgaatacgatggcgagctggcgcagaagatcatcgacgagatgttcctgttcgaaaacctggtggaggtcgacgatcgcagtatccagcgcctgctgcaggacgtggacagcgaatcgctgctgattgctctgaagggcgccgaacagccgctgcgcgagaagttcctcaaaaatatgtcccagcgcgcggccgatattctgcgcgacgatctcgccaaccgtgggccggtgcgcatgtcgcaggtggaaaacgaacagaaagcgattctgctgatagtcagacggctggcggagagcggcgaaatgattattggcggcggcgaggacacctatgtctgatcgcattaattccatgccctggcagccctggtcactcaacgacctcggcgacgcggcgccagcttttgaaccgccgctaccgacgttggataacgaagccttgcagcctgacgctcaggcggaactgcagcagcagcttgccgccctgcgcctgcaggccgagcagcaaggtcagcaatccggttatgccgatggccagcaaaaaggctatgaagccggatttcagcagggacttgaggagggccgccagcaggggctgctggaagcacagcagcagcaacagccgctgaccgaccactggcagcagctggtgagcgagtttcagcacacccttgatgcgctcgattcggtcatcgcctcacgcctgatgcagctggcgctaaccgccgcgaaacaggtgcttggccagccgccggtctgcgacggcactgccctgctgacgcaaattcaacagttgatccagcaagaaccgatgttcaacggcaagccgcagctgcgcgtacacccgcaagattatgagcgcgttgagcagcagttaggcaccaccctcagcctgcacggctggcggttgctggcggacggcgatctgcatcccggcggctgtaaggtcagcgccgaggagggcgatctcgacgccagcctcgccacccgctggcacgaattgtgtcgcctcgccgcgccgggagagctgtgatgaccgcccgtctcggccgctggctgaattcgcttgaagtgctggagcagcgtatcgcccgaacgccgaccgtacgacgctatggtcgtctgacccgcgccaccggtctggtgctggaggccaccggcctgcagctgccgctcggcgcaacctgccttatcgagcgcgacggcgggggcggcgtgcaggaagtggaaagcgaagtggtcggctttaacgatcagcggctgtatctgatgccgctggaagaggtcgaaggaatcgtgccaggggcgcgggtttacgcccgcagcgcggcggacggccagcacgccggtaaacaactgccgttgggcccggcgctgctgggacgcgtgctcgacggcggcgccaggcctcttgacggcctgcccgcgccggaaaccggctatcgcgcgccgctgattaccgcgccgtttaacccgctgcagcgtacccctatcgagcaggtgctggacgtcggcgtgcgcaccatcaacggcctgctgaccgttgggcgcggccaacgtatgggactgttcgccggctccggcgtcggtaaaagcgtactgctgggcatgatggcgcgctacacccaggccgacgttatcgtcgtcggcctgatcggcgaacgcggccgggaagtcaaagactttatcgagaatattctcggcgccgaaggacgcgcgcgttcagtggtgatcgccgccccggcggacgtatcgccgctgctgcgcatgcagggcgccgcttacgccacccgcatcgccgaagattttcgcgatcgcggccagcacgtgctgctgatcatggattcgctcactcgctatgcgatggcgcagcgtgaaatcgcgctggcgatcggcgaaccaccggctaccaaaggctatccgccatcggtattcgccaaactgccggcgctggttgaacgcgcgggcaacggtatcagcggcggcggttcgattaccgccttctataccgtacttaccgaaggggacgatcagcaggatccgatcgccgattcggcgcgcgcgatcctcgatggtcacgtggtgctgtcccgacgtctggcggaggccggtcactacccggccatcgatattgaagcctcgatcagccgcgcgatgacgtcacttatcgatgacgaacattatcgccgggtacgcacctttaaacagatgctggccagcttccagcgcaaccgcgatttaataagcgtcggcgcctatgccgccggtagcgacccgctgctggataaagccattaccctgtatccgcaaatggagacctatctgcagcagggaattttcgagcgctgcggttatgacgaagcctgtctgcagctacagcagctgattgtttaacgccatcggagacgccacgcgatgaaagcacagtcccctttgattaccctgcgcaatctggcccaggaggccgtcgaacaggcggcgcagcgcctgggccaggcgcgccaggcgcaacaggccgccgagcaacagctgacgatgttgcttaactatcaggacgagtaccggcaaaagctcaacagcaccctttctggcggcatggaaagctcgcgctggcagaactaccagcagttcattgccaccctcgaacaggctatcgaacaacagcgccagcagcttctgcagtgggggcaaaaggtggatcacgccgtgaagcagtggcaggaccatcagcagcggctgaacgcctacgataccctgcacacgcgcgcgcaaaacgccgagctacagttggaaaacaaacgcaatcaaaaattgatggatgagttcgcgcaacgcagtacacaaaggaataccgcttcatgaatctcaatgctttgcccgcccttagcctacccggcgacgccagcgccctggcggatctggcgctcgatgacgctcagctgtcatctgcctttgcgcaactgcttggcgcgcgcttcacgcccgcgcaaagcggcacgctgccgccggcggcgctgagcgccgacgatgaaagcgccccgccgctaagccgtaaccagcttaaccagctgctggccgcgcttggcgaacgcggcgcgctgctggtcaatgcgctaccggcatcggcggaaaacgccgtcgacgcaacagcgaaaaaagaggatacgcgcccggatacgccgccgctcagcgaggcgaaaactttagatccggcgacgctgcaggcactgtacgccatgctgccggcggcaatcgtcgccccgccgccgcagaccgcgctaccgcaggctcaaccagctgcgaccagcggcgataaaaccgcgctccacatcggcaacgcggcgactcagcatgtcgcgaacctgccggaagccgaaccggcggcgaagccgcagccgggcacggatccccttagcgggcaaaatctgccttctcctgttgtgcagaccgcgaccacgccgcagcacgatatggccgaacctccggcggagaatactccggcgcagccagccgccgtcgctttcgccgccgccagccccagccagagcgccacgcccgccagtgcgctggtaaccgcgccgccgacgccgcagcttaatgcccagcttggtagcccggaatggcagcaggcgctgagccagcaggtgctgatgttccaccgcaacggccaacagagcgccgaactgcgcctgcatccgcaagagctgggggcgctgcagatcaccctgcagctcgacgataaacaggcgcagctgcacatcgcttccgcacacggtcaggtacgcgcggcggtcgaggcggctatgccgcagctacgtcacgcgctggctgagagcggaatcaacctcggtcagagcagcgttggcggcgaggcgacgccgcagtggcagcagcaaaacggtaacggtgaaggccgcgccagctacgctgaacgccatggcggcggcagcgatgccgcgccgattgagccagtcagcgccccagcagccctgcagcgaatggccaaccagctcaacggtgtcgatattttcgcctgaggggcgctaaacggccaatctggcccccatttgcccgtttattccggctattgcctcgcgcgttagccgcgataatacctttatatgtcatacgtgcggcgccgccgcgcgtgatgcccgtcagcaacgcggcgggcggaacaacaggaatttgatttggctatgtctcaaaactcccttccggcaaccgcgcccaaacgccccttactgatcatcctgctgacgatcgtcgccgtggccgcctgcgcagccgcaggttacagctggtggctgctgcaacagcgcgacggcggcgcgcaaaccgccatcgaaaaggaaaaaccgcccgcgccgccagtatttatgccgctggataccttcaccgtcaatctggtgaccccggacaacgatccggaccgcgtactgtatatcggcctgacgctgcgcctgccggatgaagcaacccgccgccagcttaatgatttcctgccggaggtacgcagccgcctgctgatgctgctttcgcgtcaggaggccggtcacctggcgaatgagcagggcaagcagcagttggtcgcgcagatcaaagagacgctgagcgcgccgctggttaagggacaaccgaagcaggtggtcagcgatgtgctgttcaccgccttcatactgcggtaatcaccatgggcgatagcattctttcacaggcagagatcgacgccttgctcaacggcgacaacacgggcgacgagcccgagacggttgtcggcggtaaagagagcgaggttaagccttacgatccgaatacccagcgccgcgtggtgcgtgaacgcctgcaggcgctggaaattatcaacgagcgttttgcccggcagttccgcatgggattgttcaacctgctgcgccgcagcccggacatcaccgtcgggccgattaaaattcagccgtaccacgagtttgcccgcaacctgccggtgccgaccaaccttaacctggtacacctgaacccgctgcgcggcaccgcgctgttcgtcttcgccccgagcctggtgtttatcgccgtcgataacctgttcggcggcgacgggcgtttcccgaccaaggtcgaaggccgcgaattcacgcccaccgaacagcgggtcatcaaacgcatgctgcgcctggcgctggacgcctacggtgacgcatggagcgcaatctataagattgacgtcgaatatgtgcgtgcggaaatgcaggtcaaattcaccaacatcaccacctcgccgaacgatatcgtggtgaccacgccgttccaggtggagattggcgcgctaagcggtgaattcaatatctgtattcctttcgccatgattgagccgctgcgtgaactgctgaccaatccgccgctggagaattcccgccaggaagatagccagtggcgcgaaacgttggtcaagcaggtgcagcactctgagctggagctgattgccaacttcgtcgatatcccgatgcgcttgtcgaaaatacttaagctgcagcctggcgacgttttaccgatagataaaccggatcgcattatcgcccatgtcgacggcgtgccggtgctaaccagccaatatggcaccttaaacgggcagtacgcccttcgtgttgaacacttgattaaccctattttgaatgctctgagtgaggaacagcccaatgagtgatcctaagcaaccgtctggcgcaggaaaggaatccgtagacgatctgtgggctgatgcgcttaatgaacaacagtcgtctgagaaatccagcgccaccaccgatggggtgttcaaatcgctggaggcccaggatgcgctcggcagcctgcaggatatcgatctgatcctcgatattccggtgaagctgaccgttgaactggggcgcaccaaaatgacgattaaagagctgctgcgcctgtcgcagggatcggttgtcgcgctggatggcctggcgggcgaaccgctggatatcctgatcaacggctatctgatagcccagggcgaagtggtggtggtggccgataaattcggcgtgcgcattaccgatatcattaccccgtccgaacgtatgcgtcggttgagccgctaatgaccgcccccgttaccgtgcaggccagccaaccggttaccgaaacggcaatatccggcggctcggcgctcatgcaggtaagcagcgcgctcggcgcgattctgctcctgatcctactggccggttggttgttccgccgtctcggctttgcgccgcaggcgcgcaacggccggttgcttaacctgcgcgccagctgccaggttggccaacgcgagcgcgtggtggtggtagaagtcgataataccctgctggtgctgggcgtcaccgcccagcagatcaccccgcttcatcagttcccggcgccgccgcgtgatgaagataacacggcggtcacgcctgctaacgacttccgccagctgatgcaaaacgtcctcaaacgcccggaaaaatagccatgttccctactctgttcgcttgccttcgccgtcgggcgccgtggctcgccgccgcgttactgctgctgagccctgccgccttcgcacagctgccggggcttatcagtcagccgctggctaacggcggccagagctggtcgctgccggtgcagacgctggtgctattgacctcgctgaccttcctgccagcgatgctgctgatgatgaccagttttacccgcattatcatcgtactgggtctgctgcgtaacgcgctgggcacgccttccgcgccgccgaaccaggtgatgcttgggctgacgctgttcctgaccttctttatcatgtcgccggtgttcgacaaggtctatcaggaggcgtacctgcccttcagccaggacaagatcggccttgatacggcgctggataaaggcgcgcagccgctgcgcgaatttatgctgcgccagacgcgcgaaagcgatctggcgctgtacgctcgtttggccaaccagccgccgctggccgggccggaggcggtaccgatgcgtattctgctgcccgcctacgtcaccagcgaactgaaaaccgccttccagattggttttacggtgtttattccgttcctgattatcgatttagtggtcgccagcgtgctgatggcgctggggatgatgatggtgccgccggcgacgatctcgctgccgtttaagctaatgctttttgtgctggtggatggctggcagctgctgctgggctcgctggcgcagagcttctattcctgaaccgcggagaacaatcatgacgccggaatccgtgatggccattggcaccgaagcgatgaaggtcgccctggcgctggccgccccgctgctgctggcagcgctaatcagcgggctggtggtcagcctgctgcaggccgccacccagattaacgagatgaccctatcgttcatccccaaaattctcgcggtagtggcgacgattattatcgccgggccgtggatgctgaacctgctgctggactatatgcgcacattattcagcaacctgcctaatattattggctagccgtgatcccctttgacagcgcgcagcttagcgaatggctcagccagtatttctggccgctgctgcgtattctggccctcatcagcaccgcgccggtgctgagtgaaaagcagataagcaaaaaggtgaaaatcggtctcggcggcctgattgcgatactgatcgccccaacgctgcccgccaacacgatccccattatctctgctgccggtttatggctggcgattcagcagatcctgatcggcgcggcgctggggctaacgatgcagctggctttcgccgcggtacgcctcgccggcgaagtcatcggcatgcagatggggctatcgttcgccaccttcttcgaccccagcggcggccccaatatgccggtgctggcgcggctgctgaacctgctggcaatgctgctgtttttaagctttgacggccacctgtggcttatctcgctgctggccgacagtttccataccctgccgatccagagccagccgctgaacggcaacggtttcctggcgctcgcccaactgggttcgttaatctttatcaatggcatgatgttggcgttaccgctgatttgtctgttgctcacgctcaatatcgccctgggtctgctcaaccgtatgacgccgcagctatcggtattcgtgatcggtttcccggtgaccatgacctttggcattatgaccctcggcatgatgatgccgatgctggcccccttctgcgaacacctgtttggcgagatgttcgatcgcctggcagccgttatcggcggtatgacgttttaaccttgccgttatttccctcttttttgccggacaaaatggcaataaaaaccgtttactgggataaaaacctggaaaaacgtttttattgctactaaggtccgaatgttcatagcggcttgaattaaaaaatagccaccctacaataaagccttattttaattgttagtgaattttattttttagaaaaattgaaacctcgggaaacgcagaatatttccatgcgtgggtttagtgcatctttaataaaataaggagcgacatcatgattaaggcgaaaggtaaccgtatagcgcggcgaatattaggcctgccccactgggaaagtaaccgatttaaaatcgtgctggccgacactgccgctggcggaaaatggaaagtggtgaagaaaaagaaataatcctgactggcaattgttctatccgcaacataattccaaattgcacagtgcggtagccccggtaagcgctcgcgccaccggggattttgaggccaccaacaccggcagtttcagttcgcaatggtacgagtcgtaaaccgtaggtcgggtaaggcgctagccgccacccgacaaaaaatattcctgtcggtttccattctacatttgaccatagaagatatagatattgcctggttcggaaaaacaaaagaattaataaaacaatcaaggagaaataactcctctttactctataattactttctttaaacgaatacgctcacacagcatgacgcagcgcccgtattccctttccagtctgacgacgcagcagcgcaagcagcgttgacacttccgaataacccacgtcagcggtaatcgtctcaatatctttcccctcggcaagcagctgctttactcgttcgacccgcaattgctggaaaaaagccaacggtgatttccccagcgcggcctccattctgcgctgtaaggtgcgtggatgcacgttaagcgcgccggcagccgcctgcagggaaaatccctgcgccagatgcgctcgcgaccagtgcgcaaagcggttgatcaggtcatcggcatgctgaggataacctgccggcaggcgtgaaacctgaggatggcggatatcagccgccatcgcttttgccagcaaatcggcaagcggcgggctgctctggcgaatcagccacagcgccagctccacatggcccatcattgcgccgggaaggatcggcgcagccgcattgagccatgacgcagcggcggtctgctcattgagcaaacggctatccgccaggatgaaggtatttaaacaggcggcggcaattttaacgccgtgcttcgccatgttttgcaaaaaccgcttagcgtcagcaatatcgagccagccatccggtggcgattgtcgtgcgtgaacgttgatcgccggcaccacaatccagtcgggataatccaaacccgatgcctgatgagcaggaatactcaacccatgggctgatttaacctgcccggtcattgcaatcatttgcacatcaaagcgagaaatattcatgctctggcgtcgcgccatatcattggccgcggcgaacgtatccagcaacgtcgctaagccggtgtcgaaaacgccatccagagccagaatatttatcttcatgtcgttaatggtattgaaattgtcatttttgcatatggttctattttaaccttagccatagactttcctctatcgttattaattaccagagccaaataacatgaaaaataaccctgaactgattatccttacgttaatttgtctgctaacggttatgatgtggatcccctatattattgccagagccacacgtgctaacgtcgcgcccgcagcgggtaatggccattcgccatcaatcgggacggcgccctgggcgcagcgtgcgcaaaaggcgcacgccaacgcggtagaaaacctcgttatttttgccccactggttgtggccgccgcgttgctaaacgtcaataacgccataacgttaattgcggctaaaatttatttgctcgcgcgcatcgtccattatattgcgtataccgccgggatccccgttatccggactctcgcctttcagagcggttttgtcgcgacggttactattgcgatagttattttaagttccgttttttgaggttaaaaactcccggcgttctctgccaacaccaggctttgtagcgccgtcttcagccatttggttgcccctcgctgcccgccgcgtttatgggaatagatcttcacggtgaacgggctgatggcgaacggcaaaggaaaaatcgcgatcggggcggcatgaaggaacttctctgcggcataacgaggaatcgccattaacagatcgctttgcgccacaataaacggcgcgctaagcattgagggggttttgagcgctatctgccgggtatagcctaattcctgcagacgtaaatccaacaccccctgcttttcgttccacggcgtgaccaccagatggcgcgcggcgagataatccgccagcgtcagcgccgtgcgacaggtatggctgataaccacatactcatcctcaaaccagtcaatttcctcgagttcatgatgacgaatatcttcagcggtgctgaagcccagcgccagatccacctcccccgccagtagctccgtcagcgccgggctatgtggcaaataacggagctcaaaacgcaggcccggcgcttcatgctgcagcttttgcattagcgcagggaaaatgcataacgcggtgaaatcggtaatggctatctggatccgctctgtgctgtcggcggcactaaactctggctgtcgcgtgagttcctgattaagcaattttaatactgaagcgatggagggcgcgagttgcgtggcatagacgctcgggcacatccgatgcccttcgcgaaaaaacaacggatcgttcagcgccacgcgcagccgcgacagcgcgtggctcaacgcggaggtactcatcgccagctcatcggcggcgagacgaacggaactgtggcgatagatggcatcaaaaacaagcaacagattgagatcgaggcgtctgagcgccggatgcataatattcatcattgggtgatttcattgcacttaattcttctgacaataccccctatgcttagcgtcatcaatatcattaacgtgtgaatacgacaggaaaaataatgagtattacgattcgacaggcccgtccggacgatgcttctgccatctacaacatgatttatgagctggcggtgtatgaaaaagccccgcaggaagtggtcaccacccccgacgagatccgcgaaaccttatttggcgacgacagtaagaccgaagcgctgatctgcgaaattgacggtaaaacggcgggctatgccgtgttcttcaccagctattcaacctggctcggacgcaacggtatttatatggaagatttgtatatctcaccggattatcgcggccagggcgcgggtcgagcgctgctaaaaaccattgcccggtatgcggttgcgcgccgctgcggacgccttgagtggagcgtgctggactggaaccagccggccattgatttttacctcagtattggcgccgcggcgcaaagcgaatggatacgctatcgcctcgatggcgaagcgctggttaattttgcggagcaataacattggttacagcatcactcagcttgctctttgcaaaaagcacagcagccccgaaagagcggagctgctgaaaggcaagttagtacgctgtttcagtctgcgatgaatcctgcactacctgtagaatattggccgcggcggcggtacccattttgacgtaagaggcgtcgcttacgccgccaacgtgcggagacagaatgacattttcgacccgctcccagatgtgcggcgtagtgagtggttcgctgttaaagctatcgagcgccgcccagcgcaatgcccccccttttaatgccgctgccagcgctgcatcgtcgattaatccgccccgcgcggtattaaccaggatggcgccgggtttacactgtgccagggtaacggcatttatcattccccgattttgcggcgttaagggacaatgaagggagacaacatcagcctgcgcgagaaagtcttcgagtacatcaacacgttcgcatccgggaggaaccgtggcggcataaggatcgtaagccaacaccttcataccgaaggcgccggcaattttcgccacccgactgccaatcgcccccagaccaatcagccccagcgttttgccttccagttcgagcgatttatgcgtcgatttatcccagtgcccttcgcgcaggcggcggtcaagcggaatgattgacttggcacaggccagaattaatgcccaggcgtgttctgaaaccgccgcggcgttagcgcctgtcgccgcgcgaaccatgatgccgcgcgccaccgccgcttcgacgtcaatgacatcaatgccgctgccatgcttggaaatgaccttcaacgccggagcggcatccatcacagatgccgtaatcttgccatagcgcactaatatggcgaccggattatgctgctgacataatgctatcaattggttttctgtaggttggcggccagcaaacacgagctcataatcttccagcatgccgatcgccgcttcggccaaatcgctgccggttaccagtacgacttttttagcgctcatggcaatgcctccccttcgctcagcatacccgcctgacgcaacgcattctccagccagtgtgggcgaagatcgccatcgtggatagccgaaagacgtttgacttccccttccagtttacctttcgccagctcaatgatggtgcctacttcatcgcgggggataaccaccacgccgtcaatatcccctaccaccaggtcacccgcctgcaccgcggcgcccgcgaccgaaatagcatgattgacccggcctggaatgaacttggtgggaccacacggattaagaccggctgcgaaaacaggaaagctttgtttacttaaggtttcagcatcgcgaactgcgccgtcaatgatgatacctgcgatgccgctggcctgcgcctgcgtggccatgatctcacccagtaaagcgcaggagagatcgcccttgccgtctatcactaacacatcgccaggtttggcgacggccatcgccgcgtgaatagccagattatctcccggacggacctctacggtaatcgccgggccggccactgccatgtgtggcgccagtggcttgatacggccatgtaatgtgccgcgtcgtccggccacgtcggcgagaatcgccgcctgatattcagcggcctgacggacctcctccgcgctaacgcgttcaatatccacattgattaatttctgttgtgatgcaggcatggttagtctccatttgttttactatatacaacacagatgtactatataaaacaactatacgagcattgcttctcttttcgccagcgctgagagcgtgtttgtgatgtaaacacgatgttaatcacaaaattcaggtacaattttgttcggccaaaaggagaaaatgatggggaatgaaggcgtaattgccgttgaaaaggcgctcgctttactggattgcttccggcccggtaatgacagcctgacgttaactgagctggcgcagctttcgggataccacaaaaccaccgtttatcgcttaatgaattcgcttgagcgtatgaactacattatccggcatgatgatggcacctatacgctcggccaccgtctgctctatctcggcaagctttatgagcaatcatttcagcttgcgagaattgtacaaccggaattgcaggcgctgtctcaggcctccagtgaaagcgcgagctggtatgtgatagagggcggccaacgcctgtgtctgttccgcgccgaagcgtcagagggattacgccatagcaacctgcccggcagtcaatttccactggatggctccgctatcagcaaagttttacgtcattggggactgggtgaggcgctttcggaagacgaagaaacgctgccgttctatacctctggcgcgcgcgatccgcacaccgcggccttcgcgatgccggtttttggcgtccacgataaccccatcgcggcactggcgctgacaggaccgtcatcgcgtctgactgcggaccgcaaagaaagcggcctcagccagctaatgcgcgagacggccaaccgcctgtcgatcaagttaggagccagtaaatccttctgcgaaacgttttacgatataaaagaataacgtatgttgaaaaggcgggaaaaaccccgcctttgcttattaatgggtgaccggtttttcctgaccggcaggctgcgagtaacggcgtcccatgatcagcaccgcgataccgcctgccaggcacaagccagccagtggtagcatcgccagcgtatggcttcctgtctgttcgctaatcacaccataggcattcaccatcaccactccgccaatcagattagctatcgcgccgattgccgccagccccgcggcggctgaggtgctgctcatccagcctgaggccagcgcccagaatggccccttcgccgaataagcgccaattaatatggtactgagaataacaatggtaatcggcagcgagagattgatgaacgccgcgaacacgccagccgcaatcataaagagggtgagagccgtgtgccagcgacgttcattagtgcgatccgaactccgaccccagacaatcatcagcaccgaggccaggccataggggatagcattaagcagcccggtagtcaggttatcaagatggaaagacttcagtagctgtggagaccagacgctaagcgtggtgccagcagacgacgcgccggcataaatcagcgccatcagccagatttggcggtgcttcaacagctgccatgtgctgatgtggccgatctgtttctgctgttgacgctctgcctgaagggtgttttccagccacgctttctgccgctcgttcaaccagccagcctgatgtgggcggtcccgcaggataaaaaatgcggctatccccagcagcaccgcaggcagcccctcaataatgaataacagatgccagccgcgcagcccaaaccagccatccagcgtcaggatcaaacctgaaagcggtgaaccgataaagttagccagcggaatggccaccataaaagaggcaataatacgcgcccggtaacgcgaagggatccaccaggtaagatagagcaccacgcccgggaaaaagcccgcttccgccgctcccagcagaaaacgcacgatataaagggaggttgtattttgcaccagcgccatgcacatcgataccactccccaactgatcattatccgcgggagccacaatcgcgcgcccaccttctgcatcgccaggttgctgggtacctcaaatataaagtaggcgacaaaatataagctgctggcgaagccaaaagccgccttgctcaggcccagatcctcattcatctgtagcgcagccatacctatattgccccggtcaataatcgagaccagatagcttacgaccagaaaaggcaggatgcgccagataacccgccgcatggtctctttttccagcgcatcgttgtcgatagcgctattcggtgattgttcggtcattgtttcctcgcagggtttcattatgtttatcaggaaaacgatgtagagatatcatgccttacttcagcttgacgcctctggtttctggcgccagccacaccaccaccattgccgccaggaaggcgaccacggtagtcgccagtcccgcagtgaaaccgccggcgctggccacagcgccgatgagcaggggcgcgataaatccgcccagccggcctccgttgtaggcgagccccatcaggaagccacgcgatgacgtgtctccgatgatttctgcaaggaatggtccagatccggcaaaaatcccgttaacaccaaaaccagccatgaaaatcgccagcatcagaatgaagggttgagtggtcacaaggtaaagcgcgacggcaatggcgcccgttaacagataaatcaggaacatcggacggcgtccccatctatccgccagtactgaaaagaccagaaaacctgcgatcgccccgacctgcagcgcgagcacaaatttcaggctatgtaaaaaatccagatgttttacttctcgtagataggtgggtgtccaggtaaataccccccagaatagatactgaataaagaagataaagacgaaagccagcagcaggcctttcagattgtgtttgcccagtttcgaggcaggttgagtgcgcttagctttcccctgctgtcgtgcaagccaaacctgtgattccggcgtgaaccaggccaccacgctcataatgaataccggcagcgcgccgatcataaacagatagcgccatgcgccctgctccaggccgtcgttaaccgagctcacgattgccgtcaggctgatagccagaatagcgccaacgggtaagcccatttgcatcaaagcgccgccgcgcgcgcgccgctctggccgccaggtttcagcaatcagcgccgcacctgacgtccacattccgcccatacccagcgcaccgcaaaaacgcaaaagtgcaaaatgctgttgatcgtgcgtaaaggctaacagtccggaaaagagtgaatagatggcgatacaggtcatggccgtttttacccgaccaattttatcggcgataaaaccaaacaggatcccgccgatgatctgtccaccggccgtgacgctgataaacagtccaagttcgcttttattcacgccaaacaccattcctaataccggcaataataatgagagtagaaatgagtcgtagctttcaaatgcccagccaaggccgcccagcgccagagttcgtttctcagccacgtgctgaggcaaagcgtcaggcgtcgctttagtcgcagtaaactgcttgagctcgcttttactggtcattgatattctccacagaggttatccggtagcaggttgcggcagtgcgccagaacaactgcgcctgttcatcaggggaagcctgttgcgccaggcgtttgcacgcattccagaagacgccgtagctgaacatgcctttgtcgaccggaaagttactcgcaaacatgcagcgttccgcaccgaaaagagcaatgatggtctcaaaccacggttgccatgcctgtgccagcatttgcgaatccggcggcgtttctgccgctgcgaagggaaatcccctgaccgtcataccaaatccgctaatttttacgcatacgttcggcagttccgccagatgtcgcatactgcttcgccactgctgaaacatgtcaggatctctttctgaataaggccctacgccgacaggcccgccgcagtgatcgagcacaatctgtagcgttggtatttgccgcgccagctcggcaatttcatccagttgcgtgtggtaaacccacacatcaagcgacaatccatttttcgcaaggcaggcagcgccccggcggaacggttcgctcagggccagtcctgccggtggtgtaaccgggctggacgtgacccgcggatccggatgccaggccaatggattacgcattccgcgcaaccgcccgcctgataaagccagcgcgctctcgatggcaggctgcatcgcatcgcccgccagcaagctcaggccgccgatgatggcttcacatccaagagcgtttgcataatgtccgctggcgaacatcgcggctattccgctggcaaactcaatttcaccaagcggtttcaacgtttccggcccgtggcgacgcaacatagagcggcattgcacgtagaccgaggagaaaacgcgatgccctgaggtctggatatcgtcgctgaactcatgggtgagatagcgtccggtttgccgatcccagagatgatgatgcgcatcaataatgggcagctcgggttgtagtggcggctcacgatgtaacgcaagccactcgtttctgaccgcaagatgcggtgcggtaacgatctccatgaacacctcgcaattgttgtactatgtacaaccgtgttttattttacaaaactactataacgaggctggcgtgtttttatccagttaacgattggtttaaatgatgtaaataagaggtgaatcacagatgttttaaagtcgctaaagacggagaacgttgagaaaaaacaaaaacaatttaatttcaataagttataatgttatgccactcatcgcagccaggtatctggcaaaccttacgtctgccagacccattcactctgtccatttacggatgactattcgatgagtaaagcgttatatcgccctggggcttttcagcttccagaccagcgccataccgcagatcatcgccaccgccgccagtaacggcagtgacgaaagaccaagctttgccgataccagtccgccgacaagcgcgccagtaccgatggcggcattgaaaatggcgacgtagatcgcggatgccggctgcgtagcctcccctgcgctacgcaacagccaggtttgcaaaccaacgaacacgatagccatgcccgcgccccatacgccgagcaataccgcgacgaaccaaacaggaagtgctgacccacccctgatactcagcatccccagcgcgcctgcgctgagcagcagtgatgtcataatcagcactcggatatgtcgatcgatgagtttgccggcgatgagatttcccagcagccctgaaagtcctgacatcaataacagcgcggaaatcgttgatgtcggtataccacgggtttgcgttagcaacggctcaagataggtgaaggcagcaaaatgcgcggaaataatgcaagctgtagcgccgaacaatgaaagcagtagcggatttttaactatcccaacgtaaaccttcagcctcaacggctgcggagccgccagcgtgggaagcgtccagagcaaagccacggcggtggctaatgagagcagtgaaatcgcactgaatgcctgtcgccagccgaccatgtcggcaataaagctcgatagcggcacgcccagcacgctggccgccgaaacaccggcgaaaatcaccgaggtggccaaccccagtttatcaaccggtaccagttgtaccgccacggtgcctattagcgcccagaatgcgccatgcgccagcgcccctgtcatccgcgccgtcataaacgtctgcatggtgtgcgactgcgtcgccgccagacaagaaaatgcgaggattaacatcaatacaatcaatagcgccttccgtgaaatccgggcggggatcgcgccggccagtaaagcggccagcgcggccacccagccataagcggtgacggcaagacccgctcccgcctgcgactgatgcaaatcgttcgccagcgcgctgagcataccgaccggcgccagttcgctggtcacaatcgaaaatgcgctgactcccagcgcaactacggcgagccatgcgcgcactggcgtcgggttggcctgtaaaacgaggtcgttcatgtcttctgtatccctgagtaaatggctaaaaaagagttggcttgcctgatacggttgaagttccgcgtcgttgcttattgccttctcttgaggtgaagtgcagtatcattccaggagaagtgataaaacagacatgaaaacggagagccgttttccaaaaatggaaaataatgaaagcagattttaactgggacgatacgcggatttttctggctgtggcccgctcaggtacgctaagcggcgcggcagaaactatggatatgggcatcgcaaccctgtcacgaagactcgaccggctggaaaaatcattggccgtcccccttttcagccggcatcaaagcggctaccggctaacggatgatggcgaggcgctgctggcgcgagcagaggcgcttgagcatgcagggctcgcttttggcgagacggcgaggctgcaggggaacgtggccggactggtccggctggctacctcggacaacctggcggcgcattttattctgccttcactcaacggcttgatggaaaaatatcccgacctgcgggtcgaggtgctcagcggcgtgcaatccgtcaacctgcatcgacgggatgccgatttagccattcgaatggtcaaaccggaaagcggcaacctgacgctgaagcgtctcgggaaggtggggtttggtctgtacagcgccgataccggacaagcaggctctaccgacatcgcgttcaatcacgctcactacataggctggccagaatcacaccagcatctgcccgccgcgcgctggataactcggacgcttcgcggcaggccgtgccgggtggaagccaacacgctgctggcgcagctgtcggcggtttcagctggcctgggattaggcgtgttgccacactttatggcgcggaaaaatggcctgcagtgcgtgaatgcggatatcggcgtcgaccaaaccctatggctggtgatgcattccgatttagcccattcgcggcgcgtcagagtggtggccgatcatttaattgccctgtttgatgagattaaagatcagctgacatcgccataactctataagcgctcgccgccagatacagcccgatgccgtaggccaggtgcgccagcaggctcagcgaacgcgccagccatggtcggggagtccgtgaggccgcgacgccaaaaccaaatgcgggctgcaggatcaagaacggcgcgaataaggttacgacccctgacagcagcgctgtcgccagagtgggggcataaaaccaatcggcgccgctcaacacaagcggcaccgccgcaaaagcgataccgatcagataatggcataaccagccgataaaacgctctccatgtagcgaaggggttgcgcagatggtgttatgccgcactttccctagcgaaagccataacgcccagcgcccgaccagcgcatagttcagcggcgcaatcttgagtatgtgcttctgaaagagcgaccataaatccatgactaacgtcgcgccgatccccgttactaaaatttgcacaacaaccatgatattcaatttcttcttccttttatgcgtcaatgctactctgtcgacgagtgtgcaacttaaagcgaggtttaagtcaatcatgaaagaactggatatccgcgaggtcgcgacgctgtccggcattactccttcagcgctgcgtttttatgaaaagaaaggtttgatcaaaccgattggtcgtcatggcctgcgaaggcagtaccatgaaaatgtgctgaataagctggaactgatcgtgctgggacaggccgccggcttttcgctttctgaaatagccgggatatttaacgctgacggcaagatagccattgataaccaacggcttgagcagcgcgcgcaggaaattgataacaccattcgtcggttacagctgttaagccaggggctaaaacacgccgcccgctgtactgcgccggaacatatgcaatgccctgaatttaaaaaaattgtggcgaaaggaattcggctcttaaaatgatcgtccctgagcgatgccgctttttactcagattacggggtaattatggcgcccctaacaagacgtgtagtaccaggttaccgccaacgaagcagaccccactgagatataaacaacctcagtccatcttatgaaaattggagtcccgttttcatctcaaaccaaccaaaaggtaatggcgatcacgacaactgcgaatatcgctgtcgatccccaggcaaaagaaggccagaatgttactgcgagcatcccgaatccaagaataagtagtaccgggatcagggtgctggcaaagtacttcaattgagtagacaaccatcgttttaaaaaattattcatctgataacccgcataattgcgtcagcaatgtcattgtctgatgttggtgtgagaaagtggtgatcgtttataccgataacatgtatttgatctagttatataaaagtcgtgaggataattatcctccacagggttcattgggaaaaggaaaaacaattgacgagagatgacttttcaaccaaatagtcgtttgggcgagttagttcccgaggctccccccacttccacctgataaaaaaagggcacctcaccccgcgtacacagagagaacgggatgaggtgccaaggtgctaaatgaaaaagcggttattcgtgattagcgattcatctgaaacagcgacataccctgcatatcgctgaaagttttataagatgcctgcagcgccgcctgctgcataaaataagaagagatagattccgcaagatcagcatcggtcagggcgctcatctgcagctggttggtcatatcacgctctttaccgatgctatcgagttgatccatctcctgcagctggttacccagctcggcgcgcacgctcaataccttgttgtaggagttatcgaggccacggttggccttcgccagcgcatcgttcacctgctgtttggtggcgtcatcggccccctgcagcggcgttctcaacgcctccagcgcaatatcgatactggcgaacacatcggcgaccggcgcgctgccgtccggctccggcttcggattgctggtcagcgccataaataccgaattaccggtatggccgatggtcatcgtacggttggcgtcgaccttctgttcaacggttttattgccgccctgatagctaatcttgccgttagtatcgacaaacggcggcttatcattctcatagccgccaaacaggtagcgtccgttgccgtcggtactgttggcctggttgagcagttgatccttcagcccctgtagttgggtcgccagcgaatcgcggtcgttatcgctctcggtgccgccggcattaacgatcagcgccttgatatcagaaatcgtcgaggtggctccggaaagcacggtctcttccatcgatacgctctggcgggcgaaagtgcgcgccagggtgtactgattgttctcggcctgtgattgcgacagcatcaccgcccgcgatgccgccagcggatcgtcggagggattaatcaccttcttgccggttgaaagctgctcggcggccttcataaacagcgactgattgccggtgatgccggtcatgttctgttggtacatcatgctggtgctcatgcgcatgctgtcagttcctcaatacaatcaacgaatattcagcagcgcgtcgaacagcgagctggcggtctggatcacctgcgcgttcgccatgtagtactgctggaaacgcaggagctcgccatactcttcgtcgaggtttaccccggagagcaactgctgttgacgggccagttgggtgacgatactggactgcgattcgctgctcaccttcgcggcggcggtctggttgcccacgccgctgacgatcccggcgtaggcgccgctaagcgtcgctttgccatccaccaggtttttggtctgcagatcgagcagttttttagcgttatcgttatcgccgcggccgctgtcatctttaccggcggcggcgattttcgctgaatcggtaatcgccactttcaggttgcccgccacgtcgctgaccggcttcaccgtaaagctatctttctgctgcgggttgccatcaatactgacttcgagaccatcaaagctcagcgtcgggttaccgtctgcatctttaccagcggtggcgttgactttgacgttgtcgggcagacggctgacctgccagttggcgccgtcatactctacgcggtaatcgttggcttttaccttgctggtatcggtatacgacaccgacagcgaggcatcgccggtattgcgcgtgttatcaaccacccgcgcgccgctgaagctgaagaaatcgcccccctgctcaccgttgagatcgaagccctcgcggtgctgctggttaaagctatcggccatcgccagcgccagttggccgagctgattgcgcacgccgtccagcgtctcgctgcgaaaacgcagtacgccgctcaggctgccgctggtgatctgcccttccggcacttcgctggcgccgctgccgcggttatagccgagagtcaggcgcgaagggtcgctgctggaagggatcgcttccacctgatagctgttgttgccctgcaccagggtcaggccgttggcgaaggagacggtataggcgtcgccgtcctgctgggttacctgaacgcccaccagttggttgagttcgctgaccagctgatcgcgctgatcgagcagcgcgttcggttcgccgctggcgctgccgcgcaggcgggtaatctcatcgttaagacgggcaatctgctggctatagctgttaatctgctgagcggtgtcattaatctgctgattaacgccgctgtccatgtcgcgcagatatttatcggtattattaaactggtttaccaggccgttagccttgcccagcaccgtctggcgcgccgcgtcgtcgccggcgttgctcaccaggttctgcaaattggtgaaaaaatcctgcaggctgcccgacagggtattagttttgctggccagcagattatcgatctgcgaaatcttttcgtagtaggcgttctgcgaaccggccgcgctctgcgcgccgcgcagctggttggtgatgaactggttatattcgcggttcacgctggtcacggtcacgccgttaccgataaaaccgttcatggtggccaggccgccgttttgggccagaatcgccgtctgccggttataacccgccacgttgtagttagagatattgttgctgacggtactgagcgccacctgcgccgcattcagtccgctcatcgccgtattgattaagctattggacatcagggttccttatgctgccaagtcaattcgctcagcttgcccttgttatcggtcagagaagtaaaaacttgagtaaatctgcctgcaaaattccgcagccgcttttatgccggatggcgctacgcttatccggcctacgcgctgtgcgatttggtagcccggagaaggcgcgacctccgaacctagaacagatcgttaatatccgcggcataggctttcaccgcctgcgccccggcgtgcttcatctgctgaatcacgctgaccagcttgctggcgtactgcgggtcggtggcgtaacctgcgcgctgcagctcgtgcgccgcctgctccggagtggacgcttcggcaaccgaggcatagcgcgggttgttggtcagcagcttgacgtaatcagcaatcgccgagaagtacgaatcgtagacacggaatttggccttcaccttcttcgccaccccctgttcaaactcagtggtggtgatctcggtaaccggccccttccagttgcccccggctttaataccaaacaggttgtagctcggcgtaccgtcagcggtcaggatttcgcgctgcccccagccggattccagcgccgcctgggcgacaatcagctgatgcgggatcccgctctgctcgctggcggcgcgcgccggcattgacagacgggcaacgaaattgccgttgttgagcgatagcggcgcggcgaccggcggcgctttcggcaccgcccggcggatcatctgctccagcgcctgattcggcagcgtctgcagcacctcattatccagcgccatcggcgcggtgcccgccgtttcgctggggaccgcgttggcgttgctcatctgcttgaccatcatgtcggccagccctaatcccttttgcgacatctgctgagcaatctgctgatcgtacatcgaggtgtagagccgggtctggtcgctgctgagtacgccatcctgcggtagcgcggcgcgcatgctctttagcatcatctgtacaaacatgccttcgacctgctgcgccacctgcttaaggttgccctgcggatcggcggcggcatcgcgcttcaggccgttcagcgcctgggcgtcataggcggcgcccgacatcgccataacatcgctggccattagataatttccagtttggcgcgcaggcagccggcgctttgcatggcttgcagaatcgacatcaggtcgattggcgtcgctcccagcgcgttcagcgcgcgcaccacgttgttgaggttggcgctggcgttgattttctgcagcgaaccgccctgctgctgcatcgaaatctgggtattcggcgtgaccaccgtctggccgccgccgaacggcgtcgtcggctggctgacgctggtttgtctgtcgaccaccaccgacaggttaccctgagccaccgcgcaggagtcaaggatcacctcgcgattcatcaccactgaaccggtacgcgagttgatgatcactttggcgtccatggcgccaacgttaacgttgatattctggatctcggcaaggaaacgcacctgcgagctattgccctgcggcaccagtacctgaatggtgcgcgcatcgagcggcgatgcggtgccgccgccgcgctggcggttaatcgcatcgctaatctgctgcgcaagggtgaaatcttcatcattgagctgcaggttgagcaccccgccgctgccgaaagtagtcggcagttcgcgctcgatggtggcgccgttgctgatgcgtccgccggccaactgattgacctgtacgctgctgccgcccgccgccgcgccggcgccgcccaccagcacgttgccctgcgccagcgcataaacctggttatccacccctttgagcggtgtcatcagcaaggtcccgccgcgcaggcttttggcgttgcccattgatgagaccaccacatcgatattctgccctgcgcgcgcgaaaggcggcagcttcgccgtgaccatcaccgcggcgacgttcttaagctgcatgttggtgcccggcggcacggtaataccgagctgcgatagcatgttgctcaggctttgggtggtaaacggcgtttgcatggtctggtcgccggagccgtcgagccccaccaccaggccgtagccgattaaggcgttatctcgcacgccctgtaccgtcaccagatcgcgaatacgctccgccgtcgccggtaagctggccgcgccgattaatagcgcaatgatgagttttttaaccatgtgaatctcttttcagtaacagcgcaaatggcccgctcattagtacggggagacgttgaggaagaaccgctgcagccagcccatcgtctgcgcttcattgatgtagccgttgccgacatactcgatgcgcgcgtccgccacctgcgttgaggtaaccgagttgctaccgctgatggtgcgcgggttaactaccccggagaagcggatgaactcggtgccctggttaatggcgatctgtttttcccccaccacgtgcaggttgccgttgctcaacacctgattaacggtgacggtaatggtgccgttgaaggtgttattggcgttcgccccgcctttaccgccgaaactgttatcgccggaaatatccatatcggcgcgggcgttgcccagcaggccgtctaagtagcgcggcgcggtggcgacgccaaacttgctggaaccgttacggctggcattggcggaagaactcttgctggcgctgacgttttcctgcagcacaatagtcaacgtgtcgccaacattgcgcgggcggcggtcttcaaacagcggctgatagccgtagttcatcggctgcgcggcctgaaaaattgagccgttcggtaccggcgcggtcggcggcgcgggctgcgccgaggtcgaaccatcgaccaacggtttatgcggaatgtacgcgcagccgctcagcgtcagcatcaccatgcccgccagcaagcgttgtccctggcgcggcagggtggccatcgaatgtgtggttaccacggggtatcgcctttgttacaccaaaaaagcgacgggcgcggcaggcgacgcccgtcatcaaacattacagctgggtcagtttctgcagcatctgatccgacgtcgaaaccgctttgctgttgatctcataggcgcgctgggtctggatcatattaacgagctcttccgccacgttgacgttagaggtctcgacataaccctggtagagcataccggcgccgttcaggcccggcgtgctctcattcggcgcgccggagctttcagtttcctggtacaggttctcgcccacgctttcgaggccgctgtcgttaataaaggtggttaacgtcagttgcccgacctgctgggcggcggtctgaccctgctgggtgacgctcacgatgccatcgcgggcgatggtaatggtcaacgcgttggccggaatagtgatcgccggctgcacctggaagccgctggcggtcaccagttggccgttctgatcgatctggaacgagccgtcgcgggtgtaagcctggctgccgtccggcagcagcacctggaagaagccctggcctttaatcgccacgtctttgctgttgttggtctgcgacaggttgccctggctatgcagacgctcggtggcgaccgggcgcacgccggtaccgatctgcaggccggaaggcagcgtggtctgttcggaggactgcgcccccggctggcgcatggtctgatacagcagatcttcaaacaccgcgcgctggcgtttaaaaccgttggtgctgacgttcgccaggttgttggcgatcacgtccatattggtctgctgcgcatcaagaccggttttcgcaatccataaagagggaatcattggttatttcctttggcggcgggccgactggctatcagcttactgacagcagagagttcgcccgctgttcgttctcatccacgctgtggatgaccttcatttgcatttcaaagcgacgggcgttggcgatcatatcgaccatggtctccatcggcttgacgttactgccctccagcacgcccggcatgacccgcacctgcgggtcgttggccaacagattgccgcggcgctgctgggtttccggggtcaggcggaacaggccgtcatcgccgcgcatcacttcgcgcgcatcggctttcaccagcttcaggcggccaatctgcgcgatggtgttcggcggatcaccggggttcagcgctgaaatggtgccgtcggccgcgatagtgatttccgccgatggcggtacctcaatcggcccgccgtcgccctgcagcggcattccctgcaccgtcaactgaccgttagctgaaatctgaatgctaccgttgcgggtataggcttcgccgccgcccggcaggctgagcgccagaaaaccgtcctgctgcagcgccacgtccagcgggcgcccggtgtagttcagcgccccctggctcatatcggcgcccggcgtcgaggccgccaccagcgtgcgggtggcgaggctcggcccgtcaaccggcaccgcgcgcagcgcggcgagctgggcgcgaaagcccggcgtcgaggcgttggcgagattgttggcggtaatcgactgttgctccagcgtctggcgcgcggcgcccatcgcggtataaatcgcgtgatccataactcagttccgttagcgcaggctgaccagcgtctgcaggatcgaatcctgcgtcttgatggtctgggcgttggactgatagttacgctgggcgacaatcatgttcaccagctcctggctcaggtcgacgttggaagactccagcgcgccgctggtcagcttgccaaaaccgccgccgccggagagtcccacccgtggctggcccgaggcgccggtctcctgccagacgttatcgccctgtgacgccagcccttccgggttggagaagttggccatcacaatctgccccaggacctgggtctgctggttggagtagataccgacgacggtaccgtcatcgttaatctggaagttggtgtattcaccggcggcataaccatcctgcgctactttactcaccgaatcgctaccgacgttctgctgcatactaccggcgaagctgagcgtgaagttctgcgccggtgcgccgtctttcgcgctcattggaatggtcatactgaactcgcccgcctggccgttaacgctgaccaggttgccgctggtattgaactccatggtgcccgcgctgaccgcagccgcgctgccgtcctgggtatagacctgccatttgttatcgtcggttttcacaaaataggcgttgatattgtgggcgttacccagcgaatcgtaggcggtgatggtgttgacgtagttgtagctgtcctgcttcgccgggtcgaaggtcttgttctccggcactttatgcgtcgacttcaggttggcgaccatttcgccggaagtcgacgctttggcgttcatcatcccttccggaatgctcagcggtaccgggttggcgccctgctgaatggtcggcggcgtgccggcggccggatagccggtcagttgcagcccctgcatattggtcagattgcggttttcgtccagcttaaactggccgttgcgggtatagaaaataccgccatctttatcctgcatgcggaagaagccgttgccgttaatcgccacatccagcgcgcggctggtgccggtagtggtgccgcctttaaagttctgggtgatcccggaaactttaacccccagcccgacctgcgaaccggcgaacatatcggcgaacgacacgctgccggatttaaaacccgcggtcgcggagttagcgatattgttgccaatcacgtcgagattggtggccgccgcatttaagccgctgactgcctgagaaaaggccatgttactctccaaatattgaggatatcgataaaatcaggtgcgaattacaggatctgccgcacttcttctagactggcgttaccggcaaggccgagatccagcttcgcgccgttgctgtcgttaatcacaccgttaaccatgccgaagtgcaggctacgcgccaccagctgctcgccgttgcccttggcgttaatcgccactttataggcaccgtccggcgcggcggtaccatcatccagcgagccgtcccaggtgaaggcgtgcaccccggcggtgaggccgccaatctcaatggtccgcaccacctggccattggcgttggtgatggttgccgtcacctggtcggcggcgcgctccagttcgacgccaaacggcgtggtgctgacctggccttctttgctgccgaccagaatgttattacccggtaccatcacgccgtggccgatcagcgcgctggcctgcagcgactggttgctgttgatctgcccggagatcgcgccaagggtggtgttgagtttttcgatgccttgtacggtattaatctgcgccagctgcgaggtcagctcgttgttctgcatcgggttggtcgggtcctgatttttcaactgcgccaccagcaacgtcaggaagctgttatgcagatcctggctggtgctgcttttgctggcggaatcaagaaccgcattattggtcgattcattggtggttgcggcgatagccattgggatctccggttactgacccaacgtcagggttttcatcatcatcgacttagtggtgttgagcacttcgacgttggcctgatagctgcgggaggcggagatggtgttaaccatttcgctcaccacatcgacgttcggcatccgcacataacccttagcatcggccaacgggttgcctggttgataaaccatacgggcgggcgccgggtcatcgaccacctgcgagacgcgcacgccgccggtctgctgccctggcgccgcggccacttcgaacaccacctgcttcgcgcgatagggttcgccatccgggccggtgacgctatcggcgttggccatattgctggcgctgacgttcatccgctgcgactgggccgagagcgccgagccggagatatcaaaaatattgagtaaagacattcgccttatccttgttgcagcaccgacatcatccctttgatctgaccgttgagcagcgtcaggtcggtctgatatttcaggctgttgtcagcgaagttggtgcgttcgcgatccatgtccaccgtattgccgtccatcgacggctggtccggcacccggaacagcagatccagctccggcggctgcatggtctgtgccggaatatgacgcgccgccgtcaggttcagcgccatgccgttgccgtttacccgcccctgttgcaggactttattcagttggctggcgaaatcgatatcccgcgcctgatagcccggcgtgtctgcgttggcgatattggcggccagtatttcttggcgctgggcgcgcaggttcagcgcctcctggccaaaacgcagagcagcgtccagtttgtcgagcatgctccctccgcaaggttagaatttggagccgacagcataaacgccccctgcgccaacctatcgcgggaataggggcaaaatggggcgctatttatctgtttagtccctcggggcagccgttacacttaacccctttccgggtggcgtgaggggaacgcgatgaaaagtaaaatcctgctggtcggcctgctgtgcagcctgagcgcccgcgccgacacgctggcgacgcaaatcgaaagcttcattaaaagcaaattcaacgataatgccgtgcaggtgaaagtgctggtgcgcacgccgcccgctcagtggccgccgtgtgaattaccgcagctgtcgctgccgcccaatgcgcgaatcggcggcaatatcagcgtctccgcccgctgcgggcaggagcggcgatttattcagacccaggtgcaggtatttggccgttatctggcggcggcgcgcggtattagcggcggaacgccgctgaccccggcggatgtggtgctaaaatcaggcaggctcgataccctgccgccgcgtacgctgaccgacagcaaaaaagcgctgggcgcggtgacgctgcggaatatcagcccaggccaaccgctgacgctctctatgttgcgtcgcgcgtgggtgatcaaagccggtcagccagtgcaggtcatggccgagggggacggctttagcatcagcggtgccggtaaggcgatgaataacgcggcggccgaagatagcgtgcgcgtgcgcatggtttccggcaaaatcgtcagcggtatcgccggggaggatggatccatccgtattacgttataaaaaagtaaaggtttgccagcacctgccgataatcccattagaaacccattttggagatggaccatgagtatcgatcgcacccagcggttacagccggtttccacggtgcagccgcgtgaaaccccggccgacaacccgcttcagccgcgcaaggccgccgcggcggaaaccgccgttagcgccaccaaagtgaaactgagcgatgcgcaggcgcggctgatgcagcccggcacccaggatattgatatgaaccgggtcgaggctatcaaacaggcgattcgtagcggcgaactgaaaatggacgccggcaaaatcgccgacgccctgctgcaggatgcgcacaacgatatccagcgccttgccggtagcaaaacagataaggcctgatgatggacagattacgcactctgctggataaactggcggaaaccctgcgggcgctggatgacgtgctggcgcaagagcaacaattgctgtgtgcggatgaactgcccggcgtggcgctgcagcgcgtcaccgatagcaagagtcaactgctggcgacggtggcctggcttgaacaacagcgcccggcgctggaagccaaccttgcgctacgcgcgccttaccagggccatgaaagcttcagcgaacgctggcggcagatccagcagttaagccagagcctgcgtgaaaagaatcagcataacggcctgttgctcaatcaacagatcgcccataaccagcaggcgctggcaattcttagcaagaataataaatcgctgtacgggccggacggtcagtcgcgcgccgccagtctgctgggccgtaaaatcggcgtctgaccccctttctctgtatttcccccatggcgacggttatccgtagcgccgttttttgtcaggtggcgctacgcttacctgacctacggcggcatgtgatctgtaggccagcgcaagcgtagcgccgccgggcaataaccgcgggtaacgagccattttcgcgccggatggcggctgcgccttatccggcctacggtccgttccatttatcactccagtcagcgcagtgcgactactgataattaacgataacctgattggcaatcgcccgcagcggcgggtttaacggcccgcgggtctgtacggaatagacaaaacgcagcggcccatctgccgcctcgcctgccaacgcgtggctggtgccgctggcgctggtcagcggaatacagcgattcaggctacataaatgcacctgcagccccgccggctccgctgacagcagacgatagcgccagctaacggtctcgatgcgcgcattgccgccaggcagcgtattgggcggcagcagcgcggcggaagaatcactcatcccgccctgttcaagggtgacgccgggcccttcggcaatccatgagcccgatgccgcgccggcggtaaccggcaataaaaggcacaataaaggaagatagcgcgtcatcaggccgctccaatggttgaggtcatgcgaatctggcgatcgtcgttgatctccaggttggaaagcaccgccatctgcggcaggctacggcgcaggaagcgcgccagtagcgggcgcagcgcgtggttaaccagcagcaccggcggcgcgctgagcatctcctggcgctgcagcgcctgccgcgcctgctccagcaggcggtcggcaagccccggttcgagaccgccgccgccctgcagcgcctgcagcagcagtcgttccagttgggtatccaggccgataacctgaatttcgccattgccagggaaccactgctgggcaatcgcccgccccagcgccacgcgcacgacggtggtcagctcgtaaggatcgctttgcgttggcgcatgttccgccagcgtctcgataatggtacgcatatcgcggatcgatacccgctcggccagcagattctgcaacaccttatgcaacgtggtcagcgacaccacgcccggtacgaaatcttcggtcagcttcggcatctcctgcgacacgcgatcgagcagttgctgcgtctcctggcggccaaacagttcgctggcgaactggccgatgagatggttgagatgggtcgccaccaccgtactggcctccaccaccgtatagccctgaatttgcgcctgctcgcgcaacgcgctatcaatccataccgcctccagaccgaaggccggatcgatagttttatcccccgccagctcgccgatagcgttgccggggttgatcgctagccagcgcccaggctgcgcttcgccgctgccgatttccacgcctttcatcagaatgcggtagcgggcgggcgccagttcgaggttatcgcggatatgcaccaccggcggcagatagcccatctcctgggcgaatttcttgcggatcccgcggatacgccccaacagctcgccattttgctgaaaatcgaccatcgggatcagccggtaacccacttccatgcccagcggatcttccaactgtacgtccgcccaactggcttccgcggcctgggtattctcctgcacgatgggttcgtcggcggcttttggcgcctgtttttcgcgcccgcgcagccaccaggccagcccgagcagcgcggcggtaaacagcaggaagaccaggttcggcatccccggcaccagccccagcagcccaagtaccgcggcacacagcagcatgacctttgggttattgaatagctggccgaccatctgttcgccgacatcctgatcggtcgccacccgggtcacgatgaccccggcggcggtagagatcaccaacgccggaatctgcgccaccagcccgtcgccgatggtcagcaaggtgtagctttccgccgccgcgcccagctccataccgtgctgcaccacgccgaccagcagtccgccgaccacgttaatcaccataatcattagcccggcgatggcatcaccgcgaacaaacttgctggcgccgtccatcgaaccgtagaagtcggcttcctgcgtgacttccgcgcggcgttttttcgcctcctcttcgccgataagcccggcgttcatgtcggcatcgatcgccatttgcttacccggcatgccgtcgagcacgaaacgcgcccccacttcggcgatacgcccggcgcctttggtgataaccatgaagttgatcagcacgaggataataaacaccacgataccgatggcgaaattaccgccgaccaggaagtgaccgaaggcctccacgacccgccccgcggcggcggccccggtgtgcccttccatcaaaatgatgcgcgtcgaggcgacgttgagcgacaggcgcagcagcgtcgagaacagcagaatggtcggaaacgcggcgaagtccagcgtgcgctgggtaaacatcgccaccagcagcaccatgatcgacaacgcgatattgaaagtaaaaagcaggtcgaggataaacgccggcagcggcagcaccatcatcgacaaaatcagcaggatcaggatcgggccggccagaacctgccattgcgtatctttaacattccccggcaaacgcagcagggaggccaaattagccatcagagtcactctcttttgcaaaatccagtgcttccggcaccggtaaacgttgaggttttttcgggatcaggccgccctcgcgccgccagcggcgcagttgatagacccaggccagcacttcggcgaccgcggcatagagggtggcgggaatatgctggccaatctcgctatggcgatagagcgcgcgggccagcggcggcgcttcgagcatcggaatacggtgttgcgctcccagttcacgaatgcgcagcgcaatctcccccgcccctttagccagcaccttcggcgcgctcatttttttatcgttgtactgtagggcgacggcatagtgggtcgggttagtgactatcacgtccgctttcggcacatcggccatcatccgccgctgggcaatcgcccgctgctgttgacggatccgccctttaacatgcgggtcgccttcctgatctttgaattcgtcgcggatatcctgtttggtcatcttcagctttttgaagtggctccacagctgataaaaaacgtcaaacgccaccatcggcgtcaatccgagcaccaccagaaatccgcaatagaggatcatctgcagcgcattggccaacgcgtcgagcggctgttgggtcatcagatgcagcatcgccgcccagttgtgccacaggtacagcccggttacccaaccgaccagcgtggctttgaggatcccttttaacagctccgccagcacctgggtggagaacatgcgtttcagaccggaaagcggattcagccgtttaagatcgaatttgagcgacttggtgctgaataaaatgccgccaagcagcatcggcgcggccagcgccaccagcaccagcccggccattaccggcagcaatgccagcaccgcctgacgcagcagcattcccagctggcgcagcatttgtttgtcattgctgaccatcccgtggtcaaagtgcaggccctgcgtcagcatctccgccagttggcgagtgatattgctgccggacatcaggataatggcgagcccggccaccagcatgagtaccgaggtcagctcgcgcgagcgcgggatctggccctcttcacgcgccttctccaaccgatgggcggtgggggcctcgcttttttccagatcgctgtcttccgccaagcctgcagttcctgtgtcgggagggtaaagaatggcggtcagcatgccaaaaaaatagcgaagtcattggcggaacaacggcgaaaaagaggggttatttcatggatgagggaaaggcggcaggggcgcagcgactgcgccccgccatattcagaaaccgagactatcgagcagatcgtcaacctgcgcctggttggcgatgacgccgacgccgttctggtcaagctgcgggccgttgagcaggctatcgttggcccgtttctctttcaccggcggttccggcatgttttccatcagcaccatcagcagctgcttttcaatttcctgcaccacgtccatcatgcgcttgataacctgaccggtcaggtcctggaaatcctgcgccatcatgatttccatcagttgagcattggtaaaggaagtatggcccggcacctgatccagatactcacgggtgtcggtcaccagcgcgcgcgcgtcgtccagttcgatcgggttagcgaaccactcatcccagcgcgattttagcgcgctggcgccggactccagttcggcctggcgcggctgcgccgcctccacgcagctcaacgcccgttccgccgcctgcgccgtcatggtgacaacgtaatcaagacggtcgcgggcatccgggatcgcctcggccgcctgggcaattgcctgatcgagccccagctcgcgcatgctgtcgcgcagcatacgggtgagctggccgatacgggagattatctctcccgcggtcgctgcatcgctggcaggcattggaatctctctcatcgccctctccttacatgcccaatttttcaaaaatcttgttgagcttttcttccagcgtcgccgccgtaaaaggtttcaccacataaccgctggcgcctgcctgcgcggcggcaataatattttcttttttcgcttccgccgtcaccatcaataccggcatcgccgccagcgcggcatcggcacgaatggtctgcagcagctccaggccgtcaacgttaggcatgttccagtcggagaccacgaaatcaaagctgctggcccgcagcttatttagcgcgtccgcgccatcttccgcctcttcgacattgttgaagccgagctctttaagcaaatttctgatgatacgacgcatggtggaaaagtcgtcgacgaccagaaaacggagattcttatctgccattactacccctgaacagtgtcatttttaactcacttcacaccacgccgccgggacttcccggcggcgtgaatttaaattcgcagcgcctggccgccggcgatctgcgccagcatgcgttggctcatgcgctccagttcaaccacttcgttgaccccaccgctggcgatggcctcgcgcggcatgccgaacaccacgcagctcgcctcactctgcgccagggtataggccccggcgcgatgcatctccagcatcccctgcgcgccgtcgttgcccatgccggtgaggatcacccccaccgcattgcgcccggcgtggcgggccaccgaacgaaacagcacatccaccgagggacgatggcgatttaccgccgggccgtcgtgcaacttgacctgatagttagcgccactacgcgccagctccagatggcgatccccaggcgcaatataggcgtgtccagggagcacgcgttcgccctcttccgcctctttcaccgtgatctggcacagcttattcaaccgttcggcaaacgagcgggtaaatcccggcggcatatgctgggtgataagcagagccggactggtggccggcaacggttgtagcacctgacgaatcgcttcggtgccgccggtggaagcgccaatggcgatcagcttctcgctgctcagcagcggtccgtggcttaaaatggccggcggctggtcattggcccgctgcggcagccgcgcccgtgcggcggtacggatcttttcgcctatcagttcgctgtaggccagcatgccttcgcggatccctagctgcggtttggtgacgaaatccaccgcccccagctccagcgcgcgcagggtaatttccgaacctttaccggtcagcgatgaaaccatcaccaccggcatcggccgcaggcgcatcagcttttcgaggaaatcgaggccgtccatgcgcggcatttcgacgtccagcgtcagcacctgtgggttaaattttttgatcagatcccgtgcgaccagcgggtccggggccaccgccaccatctccatatcggcgtggccattgacgatctcggtcatcaactggcgcatcagggccgaatcatcaacacataacactctgattttactcattacttctccttggtcagcccatacacggtctgtccacgcaggtagaaatcccggctgatctggctgaaattctcggagtgaccggcaaacaacagcccccccggtttaagcaaggggacaaagcggcgcaggatgcgttcctgcgtcggtttatcgaaatagatcatcacgttgcggcaaaaaatcgcgtcgaacggccccggcagcgcccactccgccgccagcagattcagcggctggaagttgacccgcgccgccagctcctgacgcacgcgcaccagcccctgatgcggcccggtgccgcgcagaaaataacgctgcatctggattggcgtcagagtgcgcagatcttcatggcgataaatccccgcttccgctttctccagcacctgggtgtcaatatcgctggcccagacctggcaactgcccgcacgttccccgagcgcatcaccgagcgtaatggcgatggaataaggttcttcgccggtcgaggcggcggtgctccacacgctatagttcccgggacgcgagcgcgcatgctccgccagaatcggaaagtggtgcgcctcgcgaaaaaaggcggtcaggttggtggtcagcgcattgataaacgcctgccactcggcgctgtgcgggtcgctttccagcagcgccaggtagtcgccgaaatcatgaatgcccagcagacgcaaacggcgcaccagccggttgtacaccatctcgcgcttatgcgccgccagcacgatcccggcacgctgatagataagctggctgatgcggcgaaaatgcgcgtcggagagcggcagacgctgagccatctgcgccagcgccgatccgctttcacgcgccgcggttgatgtcgtctgcttcatgccgactcaccggcaaaatacgagcggtttatgcggtttgacaatccagggtctcctttaccgtggatgaggtttccggcgcgacgaagttgtcgtccgccagacggaataccgccactgcatcggcgagggtaatcgcctgctcttccagcgcagcggcggcggaagccgattccaccaccagggcggcgttctgttgcgtgacctgatccatctgggtaaccgcctgcgtcacctgctcaatgccgcggctctgctcatcggaggcggaggcgatttcgcccatgatgtcggtcacccgggtgaccgagcgcacgatgtcctgcatggtggcgccggaattttccaccagcaccgagccgtgtttgacgcggctaacggattcgtcgatcagtagcttaatttcttttgccgcctgggcgctgcggctggccaggttgcgtacttcaccggccaccaccgcaaagccgcgcccctgctcaccggcgcgcgccgcctccaccgccgcgttaagcgccagaatattggtctggaaggcgatgccgtcgatgacgctggtaatggcgccgattttttgcgaactgttggcgatgtcgtgcatcgtggtgaccacgtcatccgccagctcgccgcctttggcggcggtggaggaggcatcacgcgccagctgcgatgcctggcgggcgttatcggcattctgttttaccgtcgccgttagctgctccatactggcggcggtctcttccagcgaagccgcctgttgttcggtgcgcgaggagagatcgttgttgccttctgaaatctcctgcaggccgataagaatcgactccgcgccgtcgcgcaccgcgccgacggtaccaatcagcgactgttgcatgcgctgcaggctggcaaatagctggctgatttcgttacgcccatagacctcaatcggtgcggaaagatcgccgctggcgatacgttcgaaatggccgcgaataatattcagcggctgcatcagcatggttcgcagccaccacatcgcgctgagggtgactaccaagagcatcagcaccgccccggcaaccaaccagattgaccagccgtaggcctgctggctggaggcgcaggcttcatcggtcgtcgccttcgccagctgcagatattgcacaaagtcggcctcgaagcggtcctgtattttctgcgtcggctggtccataaaggcctgcaggttgcgattttcgaggaacacaatcagttcgcgcagcgcgccgcgtagcttctcgtagctatcgcgcgtggcatcggccaactgctgttcctgctcatccgcgcgaggcgtgttgaggaactggttaaaatagagatcggctttttgcagcgagctgcgggcgccgcccatcagcgcatccacctgctcctgcggcaccttcagcgccgcgcgggtaccggcgcggttaagggtatttcgcgcctgtagcagcgatacccagcttaggctaagcgcatcgcgctgctggctactgacggtaatacgttcaagattgtggttgtcggcgcgtagcgcgacgtaagagagcccggtgctgatcagttgcatgatgcaaaaggagatcagcagcaggaaaagactggtagagatacggattcggttaaacatagcaatctccttggtagccggtctcggccggcttacaacgcaagagaggccgccgcgtgtagggatgcggcggccggtacccgttagaacgtctcccagttatcctggtagtcgctggcgctggtttttttatgcgtagcgatggcggcaggcgcggttttattgctgaccggcgctttatactcctcctgcccttccgacttcagacggaagacggcaaccgactgcgtcagcaggctggcctgctcttccagcgcggcggcggccgaggccgactcctccaccagcgaggcgttctgctgggtgacgcgatccatttccgctaccgcctggccgacctggtcgataccgcggctctgttcatccgaagcagaggcgatttcgcccatgatgtcggtcacgcgggtgaccgcattgacgatatcgcccatggtgtcgccggcgctttccaccagtaccgagcccatatccacacggttgaccgagtcctcgatcagcgctttgatctctttggccgcctgggcgctgcgctgcgccaggttgcggacttcacccgccacaaccgcgaagccgcgaccttgttcacccgcacgcgccgcttctaccgcggcgttaagcgccaggatgttagtctggaaggcgataccatcgataacgccggtgatatcggcaattttctgcgagctgctggcgatgtcgtgcatggtttccaccacgttagccaccactttgccgcccttctgcgcggtttcggaggcgctcagcgccagctggctggcctgacgcgcgttttcggcgttctgtttcaccgtcgctgtcagctgttccatactggcggcggtctcttccagcgatgccgcctgctgttcggtgcgcgaagagagatcgttattcccggcggcgatttccgatgcgccgctatagatggcatccgccccctgacgcacgccgcttaccgtttcgataagctcgttctgcatgtgcttgaggctggcggccagcacgccgatttcattacggctggtcaccggaataggctgggtcagatcgccggacgcaatccgtttgatgtgttcaatcatgcggttcagcgggcgcaccaggatatggtggatacccatccacacgccgacgatcgccgccagcaccacgatgatgaccacaattaaggtccagatcgccgagctatacgagctgttgctagcgtcaacggcgatttgatacagcttgccgttttgctgcagataggcgttataggtctgctcgaaatcgtcctggtatttttgcgtcggctggtcgaagaaggcgttgattttaccctcgcccagcagctggatcagctccgacagcgcgccgtacaggatgccatactgctgcttaagcttttccgtcgcctgaggatcctgacgcgggtcctgcgggattttttcataggcggtgtagttgcgctcggcgcgcgccagctcttctttcgctttcgccagcagctcgtcgatagtcgcgccgctgccgattttgttggtatccatcatgtagcggatccctgcgcggttcagggagttacgcgcctgcagcagatcgacccgactttcactcagcagcaactgctgctgacggatggtttgcaggacggtaaagttctctttatcgcttttcagcgacgaaaaaaacagaccgcctgaaatcagctgcaatgcgccaaatagcaccagcactaataagagactggtgacgaccttaatacgattaaacatgtttccccttcctggaagcctgaacggccaggctttacgtatgtgactgaaagggttatcggcgtacgggaggggaactttatgccaggcggggactatttttaccgggcgcgaccgggcgcgccccgttgcttagtggcttttggcgacgttatcgaccagcgccatctcttcgctgctgagcagcttttcgatatccacaaggatcaacatgcgctcgccgagcgcgccaagaccggtgagatactcggtcgccagcgtcaccgcgaattccggcgccgggcggatctgttcagcggtgagcgacagcacgtcggagacgccgtcgaccacgatccccaccacccgctggccgaagttaagcacgataaccaccgtgttttcatcataagagacgccctgctgggcgaattttacccgcaggtcgataatcggcacgatcaccccgcgcagattggtgacgcctttgatgaaatccggggtgttggcgatacgcgtcacctggtcatagccgcggatctcctgcaccttgagaatatcgatgccgtattcttcattgccgagggtaaaaattaaaaactcctgacctaccgtttcgccagccaatttgctgacggttgctaatcctgccatggtctgcacctgttaattttatgagatgagtcgttacgcggccgcttcgctcagcagcttttcccgattgagcatttgcagcgccgacacgtcgacgatcagcgccacgctgccgtcgccgaggatcgtcgccgcggaaattcccggcactttgcggtaattgctttccagatttttcaccactacctgatgctggccgatcagctgatccaccagcagcgcatagcggcggccggcgctttgcagaatcaccacgatgccctgagtggcctcggttttcgccccggcgacatcaaacacccggtagagctccaccagcggcagatactcgccgcgaacctgcagcatccgctcgccgccggccatcggatgcaggtcttcggcctgcggctgcagcgattccatcaccgcattgagcggcagaataaacacttcttcattgaccttgaccgacatgccgtcaaggatggcgagcgtcagcggcagcaaaatacgaatcgaggtccctttgcccgcccgggaatggatttccacgtgaccgcccatctcctgaatattccgtttcacgacgtccatgccgacgccgcggccagagacgtcggtcacctgttccgcggttgaaaagcccggcgcaaaaataagcattccgacctcttcatcactcatgctgtcgctgaccgccagcccctgcgccgccgctttggcgagaattttttcgcgattgagcccggcgccgtcatcgatcacttcgatgcagatattgccgccctgatgttcagcggacagaatgagattgcccacctcagacttacctgccgccagacgggtttgcggatcttcaataccgtggtcgaggctattgcgcaccaggtgggttaacgggtcgataatgcgctcgatcaggctcttatcaagttcggtggagctgccctgcagcgtcagttccacctgcttattgagcttgccggccaggtcgcgtaccagccgcgggtagcggctgaatacatattccatcggcatcatgcgaatcgacatcaccgattcctgcaggtcgcgagcgttacgttccagctggctcatgctgttgagcagatcgccatgcgtcaccggatccaggttacccgagcgctgcgccagcatggactgggtgatcaccagttcgccgacgaggttaatcaactggtcaactttctctaccgccacgcgaatactggtcgattcgctggccttcgctctcggcgctttcggcggctcgacgacagcaggctgcggttgggcgaccggcggcggcacaacttcggccgatggcaatggtttagcggcagtggttggcggcgtggtaaagctgatctgttccggctcaagaacgaaacagagcaccgcgcaaatatcttcttcgctggcggtggtcagcagggtcacctcaaggctattgtcagtttgctgcggatcatgtacctcgccgagattgccaagctcttccagcatcagcggaatttcattggctttaagcccggttaaactcacgcgcataccgccggcgacggccgtcggcgcaggctgggccacgacgggcggcgcggctggcgcgtcctgctgctgcgcttccagcgccagctgccgcagcgcctggcagatatagtcaaagctctcagcgtcaggctgctgcgaggttttataggcgtccagttgctcctgcataatatctttggtttccagaaacagattgataatttcggtgctcaagcgcatctcctcgcgccgggcgccgtcgagcaggttctccagcagatgggtggtttcctgcaatacggaaaagccaaacgtcgccgcgccgcctttgatcgagtgcgccgcgcgaaaaatagcgttcagcggttcgatatcgggggcctgcggatccagctccagcaggtgttgctccatgtctgccagcagctcgtctgcttcatcaaaaaaagtctgataaaaagcgctaatatccatgctcatggggtcacctctgggtgtgaatcacggttaaccggcgcgggcgcgaccagctttggcagcgtatccggctggctaatctccagcgcattgctttcgccattttcatgctcaatgctctgctgggtctctttgttaagcaccagtacggtaatgcggcggttgatggcatcatcagcgccgtgctgtttcaggctcatggtcgccgccataccgaccacccgcagcaccttcccttccgccaggccgccggcaattagctcgcggcgcgaggcgttggcgcgatccgccgacagttcccagttactgtaaccgcgttcgccgctggcgtaggggatgtcatcggtgtggccggcgaggcttatcttgttcggcaaatcattgaggattggcgctatcgcccgcaggatatcgcgcatatagctttccacctgggcgctaccggttttaaacatcgggcgattctggctatcgataatctgaatgcgcagtccttcgtccatcatgttgatcagcagatgcggacgtagcgccttcagacgcgggtctgactcaatcaactgatcgagcttgtcacgcagtttgttaagccgtagctcttcggcgcgtttatccgcggtattgatctgtttgctgaccagcccgacttcacgggtcgggtcttcgccgccgccggggatcgggctgctttccgagctgcttttatcgccgctggtgagggcgactttcagcggcgtacggaaatattcggctatttgcgtcagctcctgcgggctggcgatcgccagcagccacatcacaaggaagaaggccatcatcgccgtcataaaatcggcataggcaatcttccacgaaccgccgtgatgggctggctggtgtgatttgcgctttctgaccagaaccaccgggtgattatgcttcatgcttcttcgctttccgtcgcctgcgcgacaggcgctttcacctggcgtacgtgctcttcaagctcgacaaacgacgggcgctcggtggtgtataacgttttgcggccaaattcgacggcgatttgcggcgcgtagccgttgaggctggagagcaacgtcaccttgatgcactgcatcatcttgacggtctcggcgcttttttgccgcagcagcgtggatagtggcgagataaatccataggccagcagaatgccgaggaaagtccccaccatcgcgttggcgataagcgccccgagctctgccgccggacggtccgccgaggccagcgcgtgcaccacccccattaccgccgcgacaataccaaatgccggcagagagtcgccgaccatcgccaggctgccggcgggcacttcgctctcctgttcgaaggtttcgatctcttcgtccatcagcgcttcaatttcaaaagcattcatgttgccgctcaccatcaggcgtaaataatcggttatgaactccaccagatggttatcggcaaggatgcgcggataattagcgaaaatttcactttcctgaggattgtcgatatcgaactcaagcgacagcatcccctgttgacgggattttgcgagcagcaggaacagcagcgccatcagatccatatacagcgccttactgtatttggagcgacgtaccattttgggcaaggcccgcagcgtggatttgatggcctttccgttgttgccgacgataaacgcgccgatgccggcgccgccgataatcaggaattccgccggctggtacagcgcgccaaggtggccgcccaccagtaaatagccgccaaataccgctcccagaaccacgagataacccaatatcactagcacacgcatacctcaaattaacaatgtggatggcgggcgaggcaaacgcgccctggcgtaaaccaggcggggaatggggggcggcataccgcccctgcgtattacacgtcgaaatggattgccgtaagtcgtcggaacggcgacttacatgacgcgtttagcctgctcgtccagcagttgagaggttatatcggccagttgcggagaaagtttacgtctttttacggcgcgtgaaggcggttggcataacgtgcagacgaaatcgtgctgcggatggtgcgcgtgggtgataaatgagccgccgcagttgttgcaggcagagagctgcagcataccgctatcaacaaagcgcaccagtgtccaggcgcgggtcaacgccagtagcggcgcttcgcccgcttcttgcggacactgttcgaggtacaggcgataggctttgatcaccgcttctactccactgcatttgccgctcttcagcaggaacaaataggcgttgtagaacatcgacgaatgaatattctgctcccaggtcataaaccaatccgtcgagaacggcagcatccctttcggcggcgggctgccgcgcagctctttgtaaagtttaattaagcgcccgcggctgagctgagtttcactctccagcatctgcagacgcgcgccgagggaaatcagctccatggcgagctgaatatccttcgcttcctgaacaatacttttctcagccattatcaaacacttttcttcgctgcagcgccttctttggcgcggagctcttgcagcaggtgactggaaagcaggataccggtatggatctgctggaggtcatcaacgcgcgactctttggtcaattgctcgatagtctgatggtcgctgaagcgcagattgcacaccagctgattagtttcagccagtttcaccatctgcggtaacgtcagttgcgccagggtatcaaccatggtttcgtcaattcccagacgaaacattgcggatactttttcatcgttgatcagccgctgtgctaaaaataaatacgacaggttgaagtcataaatatgcttaagtaattcggaggtacccataatccctatcccgataagccatgttaaaaaacatacacggggcgtgatacttaatcgcccgtgacctcagttatttccccaagacggcaattaaaacgctcactcgcgatagctaaaaattcagctaatcgtcaaactcaccccactgttaatagtttgttacaggtgcaaactggagtggaggatgtaaagaatttgcttcgagagagttgaattgccatgaaactatttttagaaattctataagaatattcttaaggcggcgcaactctactcccgaatcattagcacacacaattaagtatggggaaattttgaatataatgagacattgatcacaaaaacaaaaaataataccggtaacaacacctcatttcgatcactttatagccaacattcgatcatttaacgatcacaagtaaatgaattaccttaaaaaaagtgttatcaaccattgcaattagttttatttggcacatttagaacaaaaaaataacattataaaaattgaagaataaaaatctgaacgagcgttaaattcaacgtaaatcattagtttttacgataaaaaataaccatggtgtaatacaaggatattagatctaataccctgatagcacctacggaaaacgtataaaaatcgaacagtaacagtctgaggctgcctgttttttcggctcaacgaattgtacaagatgcgcgcaacttaccctcagtcgtgacgccaggcgctatttttccgcgcctgtttgtggctcaacttcgccagatacggataaattttttataacatttaccgcctggtgcattaccccaaatgggtattttttcccgagttgcttttctaacattcctttaacgaaacgagcttattaccacgttaaaataataaaaaatgagaagtaattaatggtctcaccctctcccgtaaaccatcatgaatatatttttaaaccacccaacaacggcgaatgaatattaataaataggtataagaggattttttctccggcaataagctcctatcgtcctggcgcccccccctcctattattggtaggggaaaaatgacacgttcatttgcaaagctgtagtaaagaaaaaatagctagcacgaaaggtgcaatatctcgactggatcacatttcatcgttgccgttcgcattttcatcacttcctcgttccgttggattttcggttatgtttaaattagctaaaccggtttaacaaagtttagctaaaaggaatatcagtatgaccagtaaagtatgggtactcggggatgcggtcgtcgatctactgcctgagggcgatggtcgtttattacagtgcccgggcggcgcaccggctaacgtcgcggtcggcgtcgcgcggcttggcggcaatagcgggtttattggtcgggtcggcgacgacccttttggccattttatgcgtcagacgctgtgccaggagaaggtggatatcagccatctttctttagatcccgcacaacgtacctcaaccgtcgtggtagcgctggatgaacacggcgaacgcacctttacctttatggtccgtccaagcgccgatctttttttacaaccagacgatctcccgccatttgaggccggccagtggttgcacgtctgctctatcgctctcagcgccgagcccagccggagcagcgctttcgcggcgatggaaaagattaaacataccggcggcagcgtcagcttcgaccctaatatccgcagcgatctgtggcaggatccccagctgttacggcgttgtctcgaccgggcgctggcattggctgacgtggtgaaactgtcggaagaggagttggcctttatcagcggtagcgacgatattgcccgcggtattgtgcggttccgcgagcgctttcagccaaaactgctgttaatcacgcaaggaaaagccggggtgcaggcgctgttccagcaacagcatattcacttcccggcccgtccggtggtcagcgttgataccaccggagccggcgatgcctttgttgccgggctactcgccagtctcgccgctcacggcttccctgaagatgtcgccgcgctggagccgatcgtcgcgctggcgcaaacctgcggcgcgctggcgaccaccgccaaaggcgcgatgaccgccttaccgtaccaggccgatgtgaaccgccagtattaacgatgaaagcaggcaaaataattaaaacgttttagcaaaattagcaaagcggccattaggggcattccaggcccccaatagcccatgatgatgacagactttgtagagggtactatggattttcaacagatttctcgcgcgctgctgccgctgctcggcggcaaagaaaatatcgccagcgccgcgcactgcgccacccgcttgcgtctggtactggtcgatgacgcgctcgccgaccagcaggccatcggtaaagttgagggggtaaaaggctgctttcgtaacgccggccagatgcaaatcatcttcggtaccggcgtggtcaataaagtgtatgccgcttttattcaggcggccggtattagcgagtcgagcaaatccgaagccgcagacctggcggcgaaaaaactgaatccgttccagcggatcgcccgcctgctgtcgaacatctttgtgcccattattccggcgatcgtcgcctccggcctgctgatgggactgctggggatggtgaaaacctacggctgggtcgagccgggcaacgccatctacctgatcctggatatgtgtagttcggccgcttttattatcctgccaatcctgatcgggtttaccgccgcgcgtgaattcggcggtaacccttatcttggcgcaaccctcggcggtattcttacccacccggcgctgaccaacgcctggggagtggcttcgggattccataccatgaatttcttcggcctcgaggtggcgatgatcggttatcaggggacggtgttcccggtgctgctggcggtgtggtttatgagcctgcttgagaagcaactgcgacgcctgattcccgacgcgctggatctgatcctcacgccgttcctgacggttattatctccggttttatcgccctgctgataatcggcccggccggtcgtgccctcggcgacggcatctcatttattctcagcacgcttattgctcatgctggttggctggcagggctgctattcggtggactgtattcggtgatcgtcatcaccggtatccaccacagcttccatgccatcgaagccgggctgctcggtaacccgtcgatcggcgtcaatttcctgctgcctatctgggcgatggctaatattgcccagggcggcgcctgtctggcggtgtggtttaaaaccaaagatgcgaaagtgaaagccattgccctcccgtccgccttttcggcgatgctgggcatcaccgaagcggcgatattcggcatcaacctgcgctacgttaagccctttatcgccgcgttgattggcggcgcggcaggcggcgcctgggtcgtctccatgcacgtctatatgaccgccgtcggcctgaccgccatccccggaatggctatcgtgcaggccagttccctgcttaactacctcatcgggctggctatcgcgtttgtggtcgcctttatcgtttcgctgacgctcaaatacaaaacggatgcagaataatgtcgcagccttctttgttaccgttggtcctgcaggccgtcatgaaccaccagccgcgcgcgctgcgggataagcactatccgcagtggcatctggcgccggtatgcgggctactgaacgatccgaacggttttatccacttcaatggtcgttatcatctgttttatcagtggaatcccctcgcctgcgatcaccgctataagggctggggacactggagttcgccggatctgctgcactggcggcacgaaccgattgccctgctgccagaggaggagtacgaccgtaacggttgttactccggcagcgcggtagataacaacggcatcctgacgctgtgctacaccggtaatgtgaaatttaacgatggcagccgtaccgcctggcagtgtctggcgacgcaaaatcccgacggcacttttcgcaaacagggcccggtgctggcgctgccagcaggctatagcggccacgtgcgcgatcccaaagtctggcgcgatggcgatcgctggttgatggtgctgggcgcgcgcaatctggccgaccgcggcaaggtactgctattcagctctactgatttgatgcagtggaatagccatggcgaaattgccggtagcggacttaacggcttgaaagacgccggctatatgtgggaatgcccggatctgttcccgctcggcgatcggtatattttactgagctgcccgcagggattgccgcgtgaggcacagcgcttcctgaacacctatccggcagtctggatgcagggccatttcgatcaaaccgccgccacctggcgccatggcgcgatcgaagagctggatagcggcttcgaattctatgcgccgcaaaccaccctggcggaggatggtcgccgtctgctggttggctggatgggggttcccgacggagaagagatgcagcaacctacgcgggcccacggctggatccatcagatgacctgcctgcgggaactcagctggcgccacggcacgctgtatcaaaatcccgtgcgcgaactggcggcgcttcgcggcgaggcgcaaggctggcagaccgaaccgctggcgctgcagccgatggaactggccttcgaggttgcgccagacgatgcgctgacgctggatttcgcgggcgcgctgcagctttcgctggacagccgcggcgtacgtctggcccgtcgaagcctggtggccgatacagtcgattaccgttactggcgcggcgcggcgcataaactgcagatcctcatcgaccgttccagcgtcgaaatctttattaacgatggcgtgggagtgatgagcagccgcttctttgcggattatcctggaaaactggtattcagcggtgcgacgccgggggcattctgctgctggccgctgcggccatgcatggtagaataagcgttttgctttcaggcgcctgtctcgtgatgaaacctaaacgcattaccattaaagatatcgccgaactggctggcgtctctaaagccaccgccagcctggtcttgaacggtcgcggtaaagagctgcgcgtggcgcaggagacgcgcgaacgggtgctggctatcgcccgcgagcagcactaccagccgagtattcacgcccgttcactgcgcgatagccgcagccataccattggtctggttgtgccagagatcaccaactatggttttgccgtgttttctcacgagctggaaaccctgtgccgcgaagccggcgtacagctgcttatctcttgcaccgatgagaatcccggtcaggagagcatggtggtcaataatatgattgcccgtcaggtcgatggtttaattgtcgcctcttgcatgcatagcgacgccgactatctgaagctcagcgagcagctgccggtggtgctgttcgaccgtaatccaaacgacagcgcgctgccgctggtgatgaccgattcactggcgccgacggcggaacttatcgcccgtatcgccgggcaacacgcggatgagttctggtttctcggcgggcagccgcggctctcgccctcgcgcgatcggctggccggatttagtcagggattagcccaggcaggggttgagttacgcccggaatggatcatcaacggcaactatcacccaagctcaggctatgagatgtttgccgcgctgtgcgcccgtctcgggcggccgccgaaggcgctgtttactgccgcctgcggcttgctggaaggggtactacgttatatgagccagcataacctgctggattccgggatccatttagccagcttcgatgaccactatctgtatgattcgctatcgctgcgcatcgacaccatccagcaggataaccgccagttggcctggcactgctacgatctcatcagtcagctgatcgacggtaaaatgccacagccgctacagcgctatctgcccgccacgctgcaaatgcgttatcagccagccagataataacgggcctggatcgtggttcaggcccgtactgttaacggttaattgtcatcagaaaggtttcgttggcagatactttccatcgaaagtaatcactgcacgatgtccgccttccggatcgctgacttttttcacatccagcttaaaattaatcgcgctgatgatcccgtcgccgaatttttcatgaatgagcgctttcagcgtagtgtcgtagacctgcagcatttcatagaagcgatacatggtcgggtccgttggtacgcggtcttcaatagaacctctgaccgggatggtctgcagcagcaaaacatcatcgtcgctgagctccagttttgcgcctaccattttcgcgacttcgacaggcagcggatgctggcccaatagcgcggccgtcacgaaggcttcggataaaccggtgccttcaaccagttgtgcaaaggagagatcctttttggctttaatcagcaaaattttattcgctaactccagacgaacttcgcggctgacttgtgactgaatcatggtgtgacctcgttatatcgtagtgaaatgaaattactgaccgtaaaccggcaccgctctggtatccggatgaccggccagcgaaataaaagctctggcattgccgtcataggcggcaatatcccctgtttcaatgtcatatacccagccatgtagcgacagacgtccttcatcaagcgccaggcgtaccgcaggatgggtttgaatattcgccagttgggcaatgacattttcatgcaccatcgccgcggttttggcctgtggatcgcgatgctcgcgggcatcgttcaccacttttgccgaatccgcatattgcaaccagtgtttgacggcggggacatgatccagacagctacactgcgcaatcgccgtcatcgccccgcaatcggagtgaccgcaaatcacaatatccgtgaccttcaggacagcaacggcatactccaccgaggccgacacgccgccgggctccgaaccgtaagaagggacaatattgccggcattacggatgacaaacagatcgccgggttcacgctgggtaaccagttcaggaaccattcggctatcggaacaggaaataaacagcgtactggggctctgccgggaggctaaacttttaaacagttctgcgcgctcaggaaatgcatcacgttgaaatttaagaaaaccgtcaatgatttctttcatgataatgtctacctcgctgtggaatgtcagggaggttacgcgccgcgtggcataaaataaaagtcttgtttataatcaaactcatccaaaaaacttatggattgtaagtgtgaatattcgctacgttagatatttcctcgccgtcgccgaacatcagggttttacccgtgcggcggaagccctgcatatttcacaaccggcgctctcacagcaaatcaggatgttagaagagagcctggatgcgcagctttttgaccgtagcggccggcatattcatctaacggacgcgggagaagtgtttttgcagtatgcccgtcaggcatttcaactgctggatgagggtcaacgcgccattcatgatgtcgcagacctcagccgcggttctctacgtattgccgtgacgcccacttttacttcctatttcgtcgtcccattagtggcggaatttcatgcgcgttatccgcatatcacgctggatattcaggagatgccgcaggagaagatggagggcctgctgctggaaaatgagctggatattggcattgcctttgccggggggaccgcgccagagattgtttccaccccgctgttacaggaagtgctggcgttggttgtcgcggaccatcacccgttggcccgcgaagaatccctcaccttgagccagctcgccgcggaggagtttattctgctcaatcatcatttcgccacccggttgcaaattgaccactgcttacagcaagccggttttcacccgcaggtgaccattgaaatgcactcgatcaatgccatcctcgatatcatccagcgaacccaattagtgaccattctgccgctaaatgtcgccgcccagcgcactggcctggtgacccgattgcttaaagaagccgcgcttgagagaaccgcggtgttaatgcagcgcaaaggcgcccgaccaaaagctgcggcgcgaattttcgccgaaatagcccgggagctggcagcccaaatagaaagttaagcgtacgatggcgcggccagcatctggcccgccgccttccttctgcaacaatcttaccgtagccagtatgaccatttgcgcaaaacagatttcccgcgattggcatactgaaattgttaacaatatgtataattttatctgctaagcggtattcattattccggcttgaacgtcagcattattttcatcctaccttattccccctgacaaggaattgacaatgagtgaacgctctcatgaccgaggtaatagccttgcgatggtcatatataatctactcaatccggtgccttacggcttttttatcgccggtctcatcttcgatattatttatctctacagcactaacgtgatgtggggaaaatgcgccagttggcttattgcccttggccttatttttgccatcattccgcggttgattaatctggcgcaggtctggttttttactcctcgacgcccggcggcaaaaattgatttctggctaaaccttatcgctattattgccgcgttggtaaactgttttgttcatagccgcgacgcctgggcgattgcgccgcagaacgtaatctattcatcgattaccgttatctgtctgcttgtcgccaatattatcagctccacttgcctggctaataataaggggattcgccatgaataaattactcctgcccctgcccgttatgctcgccacagcgctggcgctgtcaggatgcgatgagaaagcgaaactcagcccggatcagcaggtagggcccgatcccgtaatgccgaaggcccaggatttcctgatgccgccgatgcaggttccccgcggcgtgggctggaagagagatggacaaccggcggttgcccaggggctgaaaatagaaaaaatagccgatggattcctgcatcccagaatggtctatgtcctgccaaacgacgatattctggtcgttgaaagcaacggtcctggcgaggaaccgctgactacgccgaaacagctgattgccgggatagtgaaaaatcagtcaggcaaaggtggaaaaggcgggaatcgcattacgctattgcgtaaaaacgccagcggttgggagaaacatattttccttgaacacctgcactcgcctttcggcgtacaactgattggagatgatctttacgtcgccaataccggcaacatcatgcgttatcactaccagccgggggcgacacatatcagcgatgcggggagcgagctggctgacctgcccagcaccgtcaatcaccactggaccaaagcgttactggcaagcccggatggtaagaagctgtatgtgggcgtcggctcgaacagtaatatcactgagaatggactggatattgaatatcgtcgcgccacggttctggaggttgatacggcaaccggcgcaagccgtatcttcgccagcggtatcaggaatcctaccggactcggttgggaaccgcagacgggcaagctttgggctattgccaatgagcgcgatgaaatcggcgccgacctggtgcccgattatttaacttcggtgcaggatggcgggttttatggctggccgtggagctatttcggacagcacgttgaccgccgcgtacagccgccgcgcccggacatggtcgccaaagcgatcaaaccggattatgccctgagctcccacgttgcgccgctgggaatgctgttttataccggaaaaatgttgtcgcaaacctatcagggcggcgtgtttatcagcgagcatggcagttgggaccgttcgccgctgaatggttataaagtcagcttcgtcgcttttaaagacggcaaaccggtcggtaaaccacagagcgtgatcaccggctttgtctctcgcgatgagaaagagctgtacggcgcgccggtcggactcgcgcaggataatgaaggggcgttaatcattgccgacgatgtcggtaataccgtctggcgcgtcagcgcaaaataaaatatcactatcaattttccggcttcccgcggtcaggggagccttttttatgccctaaaattattatccatagatattgccgggaataatggagaaaacaaagtgataagcctagttatcaggaccgctatcgtagttgactacaccagaacaggttgctgagaaacattcatcatcaaagagacgtagagcagatgaaccatttatccgcaatcagaacattcgttagcgccgctgactataaaagtttcagcgccgccgccaaagccttaaatattgaagtatccaccgtctctcgccatatttccgagctggaagagtatttacaggtgacgttgtttaaccgctcaacccgtggattagcattaaccgaaaccggggcatttttttactcgcacgcccaacaactgttattacaatgggaggaaacccgtcagttaacttccgcactggataaacagccttccggcctgctgcggttaagcgtacccagtaccttcggccgtctgcacgtgatgccttttgttgatgaatttcttcgcctgcaccccaacatttcgctggatattagttttaacgatgaagtgcaggatctgattgaagcgcgcatcgacctgagtattcgcatcggcattttgcctgactcctcgattcatgcccgtaaactggcttctcagacgcgttcagcctgggccagcccgcagtggattgcggaaaaccgcccttctgccacgccgggcgccgaccagcagcagatcaatatcgtgatgttttctcgcctgcatggcgccggttggtatacccgtaagatgggttcagaagatgaatggcagcgcatctcgattaactaccgactgagcgttagcgatagcgccgccatgctttatgcctgcgtcaatcacaccgggattgcgattttaccgaactggctatcgcagcaggcagaagaacaagggctcattcaacgggtattcccggagtgggaatttagtatgttccctggcgaaaccgccatctggatgctgtacccgcaaaacaggagagtgccgcataaagtccgagcctttatcgactttatggttgaaaagattgggatgccgccctactgggaggaggagactcattaatgacgagagaggttgaagcagggatgtgccggaggaacccaaagcaaaaaggggttacctttcggtaaccccttttcatatttggcggaagcgtagagattcgaactctagaaccctttcgggtcgccggttttcaagaccggagaaatgtgttttaaaatcaataaattagtgtaaatcactggtatatttagacattatcacacccatatttttcagtaagttatccacttctctgcagataatataccaacacttttaatccttcctcacctcttaggcttcgtgtcagccaggatagcacctcggacttactcttaaaattatcgcgcgctcggatacacttttttttctgtgttaccattcagatagtcagcatgctatatcaaaaggaagtgtcatgaaaaaaagcacaatttctatggtcatcattgccgttattgttgtcctcgttacatatcttttatttaatcctgcattgaatgaaggttcccaagccgactgccaaacaggatatgataaccaagcaattgatattattaagaaagattatcttgaaaacaggttgccgaggtggagtgaagaggtttcaaaattaggcacaccgactccagccttaagctttggaaatgtaagaaccgacgctggcgcctattctgtcgattttaagataactggaccacaatcaacaattgatagaattggtatcgttgattgcaaaaatcattcagtagaatactccataattaactaaaaaatgtaaggcgcttaaaagcgccttagttattaacgatgtccacttagttgtacagggatttcgcctggcagcgcaattggatatggtttaccgttaaaccagcttaaaactgttgttgatgcctgagcaataacccctcgggaagggtcaaagtttgcatcatatgtatcgttataagctcgtacaacgccattgtaagaccattcacccgactcaccaattgacagagtaccctcggtcttcatagaaatacgaccaagcaaagcagcaacatataaattatcttcagccacactctttccaaagttgcttgaaatcgggtagttgcctggtggttgtgattttaatgcatcatttaccggggtgaggtttgactgattgaaagtcaatccaatagttgtgatatcgagcgaggtttcaacgccattccctgagatgtagtgccacaaaccgagaaatggtgcaaaggcgcctgaggtgaaattattacccggtgtatggccctcatattcattgtattgggcaaactggaaataagccttccccggatcgttaaacctcatagtttccattgttgcaaaacgggcgttaatcattggaatattttcccgccctttcgcattaaactgtagccagtctgcaaataaggcttttgtaaagctaccatcctccattgattgaatcgcgttatagagatgtgccgcatcagccattgcaggatcatcccacgtacttgaaccagcagcataataatttcccataccttcaaactgaaaattaaaggaacttccattgggaatagttgctgtaacggtcagggtatcagtcataatttcctcttttttactggataaatatacagtacttttaagttaatcgtgatcgacacacatgtcaaagtcaaattttagtaggccctcataaagccttaagcccactatgaccgaagggtcaagcggtttaaattaagttactgggtgaattgtatgatgcgctattttactcctgttctgataagcgctcctccagttcgtctactcgcttaatcaatacttgtaccgcagccagtgtgtccatcatgatcacgttattatccagttgcaggcgatcgaatttaacctgaacgccgtctttcatgtatgacatttcgacgttcttcacgtactgagagtcaacctcctgcgcctgctgtgcgataatcccccggcgcgtcctttcctgctcgtcgtcgttatagacgaacgtgaccaactcaagcgccctgatgcgctcaacagatagctggccgtcggtcggtttgatgttgtgcttcatgcgagcgtcagacgttccctggaactgcacgttcccgttctgactacctgcgatccttccgtcgctgtaaaagctccaccattgctggttagcgttgaatccctggacgctaaacgtaaggcggtggttagtgccgacctgttcttcaaaccacgccgtcgccatccctgcttctgcgcctttgctgtctttgcctcgcaccttgaaccgccaacaagcattaggcgacgtcaggatcgtgccgttcgctggcgcgccaggttcatcgaatcgcgtagcaatgaatccccaccagagattgccttcaagggtattagccccgaacgtccgctgattaccgtatacacgccagccaggtgacacggcaagcgcgccgtcttcggggatgatgcgatgcgtgtagtcagctgtactattgccatagtgaaaatcaatgtaaggcgttggcgcggttagctcgatatgagacccggcaatctgtacgccgtttaaatttccgttaaccgttaggttcttgtcgaccgtcaggttgtttttaaaggtgctgcttacattccacgtctgcgcctgtgtccacgtgttggccaccgtcgtcttcgctacgtccttcagcgccgtgtcaatgttctgctgtcgcgtggcgtattcgctcatgaactgcgcccacgatttcaccgtccccgttgtaccgtccggcttcgagatcgtcacgttgccaaccccgaacaaaaattgttgttggttcgcaaggtctacataagtgcggtcgaagcacttctgaatgctggccgccaattcgtcactaatgttagccatagtgcccctcagtcatatttactggaaaaaatgaacagcgccgtggtctggtaaacaaaaccagcaggaccagcggattgagcaacaggaattgcgttattagacaagaaattcccataggctcctgtgaaacttctgaatattgtccacagctgtccggttcgctgagaaataagcgaagaggcgcatggcgaaaccgcaataggttgccccatatcgcgcggtttcatatttccactaatcgctgtggtttgtacttctaacggtttcatccccgcgtgataaaccatccggcctgccgcatcaaaaataaaaccgccatacctgggaacatctataaccatatttccaaaggcgtagacagtgatatttcctgttcctgtagttcggattatctcaaggcatttaaacccgttttgtgaaaattcacgcgtgatacataccgcgtcattgtcaaagcgaatgaaaaacatgcattgcatgttgtcgggtatacgcgattgaaaaacatatccgttattaccaggaataacgacccggtcaataagattcatcggcgtaaaatcagggctcatccacatagcgccgttttcatcaacaatttgcattccatacataattagggaccgaagaaaaaaacaattcgtgacatgttggggtccacgccgttccacgacgcagcccctccagaaatagatactgaaggtgaactgcctggcgttcctgtccagtccgctgtacccaccacgtaataccgtagtgctttacccggtggtggatttccataattgacataacccgaagcctgcgtgtaagaaccgagaaaaaaaaccggggtgaataccccggttatatccctaccactggcgtcgtacattcgagcgccgtagcccattatttacagtccttattagtaaatccggtcgccagccagtgccctacgggacgaactgcctggccaggtgcaacacgcacctgcatgcgaccaaaacggtcatacctgaccgcattgatttttagctggtactgcccgtttaccggataggtgttgattttgtatgtcaccgtgcattcagttggcttgtaacgctggtctgcacaaccactaaccaggacgctaataccgcccaccaacaaaacgcaggacaccgttttgatcaaaaactttaagccctgattcatccagttgaatcctcccttgaccaggtacattgctgttcatttcgaaagccccattttttggcaaacgccagccggtggagccgggttgatagtttgttgactgcaggctgtcagaaatctgaccaaagttaatcgtcaggttacgggccatcgcctgctgaaaataagcgccgttcccgtcgataccgaagaccatatttttttgatcgccgttaggcacataaacgccaaacgtatcagcctggaccaggaactgtgactggccgctgccgttaatccccagctgaagacccgccacgtagttattaccacctgaagacgtgctgaccttcaggccccactgcgctcccagttggccgtttaaatccgccacggtggatgccgtctgctgaacggtcgcagacatatccccgacctgcgaggtcagtgtggtgatttgctccgtggttgatttttccaggtcggcaacggttttgtttgtcgtggtgattgccgcgctgttgtcgccaatcatgctgcgcatctggttaaagccggtcgccattgccaggccgttagatgcgatggtttcgtcctgccgggtaatgcgcgattctgcatcacccacacgtgagccgagactggtgatttgccctgcctgcgcggtgatatccttcccttgctgggtcacggtcgcagtaagctgggtaacggcgttcgcggcgccagtggcggtatcctgcgcctcctgtgcgtcggtcacatcgacaatgctgatatcgtccagatacagcgaataaccggttccgccgttcgcccccctggtggaaatccacatctgcgcaatgctccggtcggcaccgacggtcgccactcctgtcaggaggacccatttgccgcgcgaaatgtttgtctcggagatgcggacggcttccggccactggtttgcgccgccattctctccgcgagcaaagaggccgacagacacgttccatccgtttggtgtcgacatatcactggccatgtaagcccagagagaaaaccgatacttaccgccaccacgaacagcaagccagttcccgatcatcttgtcgctgttgccgttctcaccgttgttacgcgtgattttgagcgacttctggccattgcggtaaacatcggtcgagacgcgagctagcgagctgctgcccagctgctggtttgcggtgtatgactcaaaggaaccatcacaccaggggtttaatccctggctctgcagcgcaccgattgaggcgttgaccgacgtgatcgcgctggcattagaggcaatatcttttccctgctgtgtcacggtcgactgcaggttagacacggcgccagccgtggcatcgagatcgacccggtcagtaatatcgataacgtatacgtcgtcgatataaatttcgcctgcattcaaaaacgcgttgatgctaaccgacatggtgccgtctttagtggccgtccatgaattactgtactcctgccatactgagcccgtcggcatagtggccgggtcgaagcgcgcctcctgaataattgagctatcgagataggcaaatctaactttgttatttgcctgcgtgcccggctgcatagttgacccagctttggcacgaagccacgcgccaaatttatacgtgtgacctttaacggcagtaattacagagttattcgataacagtgttgggcccgttgacgccacgtatttaacgatcttcttaccgctgtgcgggttggtagctaacatgaccgtcgcgggcgacggcgcggtccagttgtcaaagtcccgctcgaaacctccgtttaaaatcaggttgcccgtgattttgttatccacatcagccattgctgcattcaggcttgcagaaacggcggtcgtggcgctggcattcgcagcaatatcctggccctgctgcgtgaccgtctgctgcagctgcgtgaccgcagatgtattcgcatcgatggccaccgcatcggtgatgtcatagatggcgatgtaatcaatctgaatgaccgacgcgttcgggtagcaatagagcgcaaaaacggaaccatccactgtcgccgacgatggcgcgctaaactcagcggcgtacgtcgcccaggtatccgtggcggagaactggcggttttcataagtcccggccacattccccaggtagttaaaccggcgaaccatgaaattcatcgcgccggatacgcccttcgccttaacgatgacctggtagcggcgtggggtattgtgtggcagcggcgctttctggttagcaaagaggccggtatacaacgtgctgtcgagctgcgtcatctggacgccgggtttaccgtcgccaaagtcgccaaactccaccttgttacgcgtattcccctggacaccccacagcgccgatccgctcataaaattaaaatcgtttgccaggttctcgccgcgattgagcatcgcattcaccgcgccggtgacggaggtgatcgcctggctgttcgtttcaattttcccttccgctgccgtggttcgttgcgtcagggactgaattgcgctgctgttcgcgctctgcccggattcaaggttcgacactcgacctgtaatggctgtaatagcctggctctggctggtgatagtgttgccctgctgcgtcactttcgcatccagctgggtgacagcaccggcggcagcgtcggcggcagtctgtgcgccctgcgcagcggtgatctcccggcagtggaaatcagttgcataccagacggagccaaacggcgcgttctggttcacctgcaggaatgggcgcatatatccgcgcgggaagttagccgggaccgtccagcggtattttttctccgtccaggtctgagtgggcgcaacgctacccggtaaagcagcataggccacggcacccgtattcggtcccgtagccgagccgatgtacatgttaaatgcggcgttagaacctgcctttgccgctacccaaaccgaaatctcgaatacctgtcctgcttttaccggccacggtggcgtattgagctggtgatcgcgtgaggccagtcgcgctacatagcgacgcggagcgcctgccgggatgtcagcatcatacgggataccatcatcgtcgttgctgtctaccgtatcccgacgggtaaagcccatcgacggatatgcggggtcaaatgtcgggttcagaatgtagtcgccaccggctgccgtctgcgagttcagcgctacattaatcccggtgatcgccgttccctgcgattcaattttcccctcagcactggtgacgcgcgtatcaagcttgctcacggcatcggcggtggccgctttggccagcccttcctcaaccgtcgctacgcgtcctttcaggctggtgatggcctggttcgccgccgtaatatcctggccctgcttggtcacggtggcgctgaggtcctgtactgtcgagctatcggccttctggtcgattcgtttccccaggtctgtgttaacggtatcgattctgccggtcagttgcgttagcgatttaccctggctggtaatcgtatcgccctgctgggagacggttgtctgcaggttggtcaacgctgtcgcgttcgcgttaatattttcctggtcggtaatatcaatgacgaacatgtcatcgatatagagctccccggaggcaaggcgagccataacgctcatctgcataacgcccgatttattcgccttccacttagcaaatacctctgtccagacagaaccagtctgcagttttgttgggtcaatacgggcttcctgaatctgcgaattgtcattaaacgcaaaccggaatttgttactttgctcggagccagtaacgatagccgtcccgtctttcgctcgagcgaagcctccaaacttatacgtccggccagcgacgaccgtcaccatcgtggtattgcgtacctcatccagctgatcattgtgagctttgaggtaaagaatttttttacctgagctgggttgttgggctgtatccacacgaacatcggtcgttgaacctgtcacccaattatcaaggccacgctcaaacccaccattcgggattaggtttccggccagcttgttgtctgcatcctgcttcatcgcagaaagatctgctgacaggctcgtcgtcgcagcaacgttcgcagcaatatctttaccctgctgcgtgacggtggccttcaggctatccagcgcggcggtggtggctttcttcgccacctcggcattggtggcatcaatacgcccacccaggctggtgatcgcgctggcgttggtggcaatgtcgtcaccgttcttcgtgacctgcgactgcaggtcctgcactgctgatgcatcggctttaccagcgataccgtttgaggcggtcagcatgaagccctgcaggtaaacgcgagcggttgacggcgtccatcctccgcaggccatgcgcaggtaacaccatctccctttgaagtcattcgggatcgtgaacgtcagcgtgcgggtctggtagccggtggtgatacccgcaaaccaggtgttgtcctggacaagccagttagtcggattcccccaattctcaatcaggcccatcgtaaaattctgggtcccgatgctgatcgttgcgtcgtccgtcttgaatccgaaggtgagcgtcagtacctgaccggcttcaaccgggatttttgttccgttggcgatccgcatcgccggctcggtcgtagtgagacctttcatcaccgcgtcatagaccggagcacccgcgccggtgccggacagttgccagttatccgctttattaatcaggtcgccattcagcaggaggttgccggtcgtaatctgtgacttaagcgccgtcgtctgctgcgccgtggtggccagcgtattctcggcagtcgtgacgcgggtcgtcagttgctggacggcatccgagctggcgctgtctgccggtgcctggctccagtcgctcacaatattgccggattcaaacatcggagagctgatccacgcttcgcgcgctgcagctgcgccgtcgagtctggccacaacgagatacgccgtcccggacaagccaggtttgcgtttgtatttaacccaatagcggctccaggacgtggagagcgtcacggtcacatcgccgttatacccggctggacgctccacaataacgccctggctggtttcagcgcggatagtggcatccggcgtattcaggaaacaacgaaccggcgtcttgtccgtcttcgctttcgcatagaacgacagaacatactcggtaccgtcaaccggcgcggccagcgtgtagtcgaggacggcaaaatcagtcgctccggcggcacgcgtcaggatgcgaaccgcgttaccccggtatcgttcggttgcagatggcgatttgccggtcagttccccggagttgggtatcaggtttacgccgccgattcggatgttatcgaccttcgattccaccccggcaatctggctggcgttggcctgaactttgccgtcgatagtctggacgtcaccctcgattttctggatggccagcgtatggccagcaatgacgccgttcgctgaaacaaggtccgctgcaacctgatccgttttcgaggcagtcgactgcaggtcgctcgccagcgtatccatgcgctgggtcgccgctgccgtggatttatcataatcaacgcgcaacgtatccacgcgggagccgatggccttctccgccgtcacgcggattttccgctcttcgaaaagcaggccagaaaccagtttattcgggtctgtcccttcctcgttgccgcgcagctgcacagccagctggttacgctccattgcctcagctgagtcggcagcagtcatcgccgttttcaggtcctgaatctgcgcctgcgatgcaccaggggtcgggcgcccaacggccagccagtcaacggcataatagttatctgcgtcagccgctccaccctgtgagaagtcgagacgcatgcgacggatagtgccggaggcctgccacgggatatccgggatcgcgatagtgctgatgccggtggccgggtcaaaatctggtacgggcagtaccagacggcgtccctcggtccagccggtttcatcagcgccaatccagtaaagccgaccgccccaggccgggttgccgactttcttgatacgtaggcggaggtacttataggcgctgccgtcaatcagcgtaccagcgccggatgggctgcgcatggtcgaaatggcatccgcaggaaggagccacccttcatcagttaccggtagcggttttgtgccgccgtcgtcagaactccacccctcgttgtccttgtcgaaataccagattttgaggctgtcgaactgctcgccggtaccggctgaaatcgacgccatctgctgcgccaggctgtcaaagccgtcctgcatggtgacgttcgtcgtctcaatcgccgcttcaacttcacgtttagcactcagcaggttatcggcggcctgcttcgccacggcggcatcgtccgtttcggctttcgccaccgctgcagcggtatcgctggccgctttctgcgccgtggcggtatcacctgcagcgcggtctttcacttcctgcgccagcttgttggtcgtgtcgttagttttggcgatgttggcagccaggtccttgccctgctgcgtgacaatggccccctgcgcggcgacatccttcgccgcctggtcagcggttccctgggcggcgtccgcagcctgttgcgcggcgtcggcagcagcgctgttgtcctggatgcctttgttcagttcctcgtatgtatccgagcctttcagcgcatcgtcgagctgctggtaataatcattaacgttgtcgctggacataccctgcacccaaccggtccacggcgaggcattgcccaggcggtcaaccaggcgcgcgcggtaccagaactgcgtggcaatctgcagacccatctgctgatactgtttgcccggatacgctaaatcggtcagcggcatcgcgccgttcccactctggtccgggctgtactgcagttcggttcgctgggtgtcctctgcaccttcagggaattcccagcgaatttcgatacccgcggtcagtgaaacggtcgtcagcgccagcggcggcagcggctcgccgactttcccggtcagggttttctcttccgagtacgcccagccactggaaatttccgccgcgttgatcgcacggactcgcaccagatagcgaccggcataaatgccgctgacctcaaatgacgtggtcgagctgcgcggcacattaatccagttgccgtcattgcggcgccactgagcctcataggcgatagcgttttgtaccgcgtcccaattggcctgcagggtttcgacgctgatcccctgattcaccacggagaaggacgtcaggaggatgccatctggcggagcctggttgcctggcgggataacactaatcgggcgctggtcgatgatcgcgccggtatcgatatgcgcaaatttatccgggtcgtgagccacgccggtgatggtgagcgtgccgttattgttgtccttcacaccgataacgcggtactgctgcggcaccaggtcggtatattcgacgatccagacgcactccgcctctggtgtctcgctgtatgccgttgtgaccgtcacctgccgacgaccgttcaccgactgaatggtccgggcctgtgagatacccgacggcagattcagatgcaggcggtcgccctcttttgcatcgatatcacggtcgagcgtgatgacgcgcccattcaccgcgctgatacgaccaccattaacccgcccggccagccgttcgtcgcccagcccaatgatgtaacccggctgtgggatcctgccgtcaagaccaacatcaatttcgaccatgcggtccttgttgttggtcagaatggcccataaccctttacgatgggcttcactctgccgtgtacatccaatggccgtgacttccaactgattaaagctgtaacgggaaaccagttccgggataaatgcgggttccatcgcatcggcataggcgttatccgggtcagaccacgaaaccagggcattagtgtaccgcgacttactggtgctgctggaataccgcgggctaccgataatatttgcgcgcgtatagttgaaatcgacatcacgcggcatatcggcctgcacgatgatctgttcaccactccagcaagtcatcccccggaaaatagcggcaaaatcacgcagtacggtgtaggcgtcgttacgctcctgaacatatacattgcagatataacgaggctccatgccagcgccgcccctgccatcgggaaccaactgatcgcaatactgcgcaatcgggtaaagcgcccatttggagatattcgcgctggtcagacgatcgccaagaccgaaacgatcagagacaacaatgtcgtaataaatccacgccgggttatcagtccatgcccatttgaagccccctgtccatgtgccggtatattcgcgcgtttccgggttgtagttatccgggacacggataacacgcccgcgcggctcgcaggagatttgcgggatagaaccattgaactggctggagtcgaattcgatgtacagcagcgcggtgtgtggataacgcagtttcgcgtcaataacctcggtgtaactctgcagcgtcattatgtcgccgattctggcgctgttcgcgtccggcgtgaccttgcgaagccgcaacgtccaggtgctgcctgactgcggtaaatcgatacggtggctacgctcatacccggaagtggttttacccgtgacagcggtttccagcaccgtctgccaggtgccaccgtcggtctgcaggtcaatcgcatacttgacggtattacccaccacaccgttatcatcttcctgtttcaacagggacggccatttcaggcggacgcgaacggcagaaagctgggtattggtgaatgtgtgggtccatgcggtctcactggaaacctccgtccctacggaaatttcattttcagtaccgggaataccctggatataactttgtgcctgtgtcccaggtcggaattcccaggccacaccactgaagttttgcgaaccatcggcattctcaagaggggtaccgtcgagataaatatctttcccggttagactacccgcaaactccccctcacccaatgcgataagaactttggcttttgctacagactgtaaatcgtccggctgttccgtcggcgtgcgctgtttagagctgccacccttgcgccctttaattatgttatttgccatattgcgcccataaaaaaagccaccgcaaggtggcctgaattggagggaattacttactgaatatatttattgctggtcttcgacatagataccggcggaaataatcgcgccgccaattcgccgcttaccataaagcaaaccaacgggataaccctgtgaggcggtattagttacaccgccaaaggcatagctggctttattatctggggattctttacgggcaaggcctccgggctgaggggagagcatctgaactacaccgcctaaccccatacctataccagcgccaatcatcgcttgccctactggagccgcccatccatatgagagccccgtaacaagcacaccagcgactacgagtgctgcacctaaaattgtttgaagaatacctgcttttttacttccaataacaaccggaacaattcggataacttctccactaactggaaagcccaagtcatctttaccaatatttttcttacctttaaacacagcaaaggttaggcctttttctttgctattgcttaggaacttttcaaacccttctattgtacagcataaagcctgaatagattcccctaccgtagtaatgatacgttcatgggaagtaccaaaagttttaccaagaattccgctcaattctatttgagttttcatttccttcatattacctccagatataaacccgcattgcgcgggtttatttacgtctatcatttcaggggcaatggttttacatctacattacctgaagggtcggtaaataaccttactgcttttgtttcgccatcttttatatttatatcacgccccacaggaactgagtcagcaatacacattttaccttccccctttatagcaacattccattcgcctgaacgcagataaaacgtcgccttttcccctggatttaagatcgctgatttttcatcgtttaggtatacacctgtatagcaaccgctgccgagaaaacctttatctcgaacgactattagaactgatttagtttccttcgactgttcctggtatttcagcaacctttcagatggggtttgcttagcttgactaggcaaaacagcttccgttgcacacccggtcatagtcaacagagttaataccagagctatttttttcatctcggtgtcccttttgtttttagttaaattccacaaaagattaacacagagaatgatatcggacgattttcatcgtcctgtctaaccagtaaccaccatacggcacgcgctggctgagatggccataaaggtggtgcagcagcatgttaccttccagcaaaaccccggcatggttccatttgtccgactgcacctgcatgatcaccatatcacccggctgcggtgtaccttcaaattcacgaaacccgcattcataccagcaatcgtggtagaagttttcgggatagtcgttttcccaccaggggtaatcaacgcggtaatcgtgcagctcgatgccgtgagtctgtcggaaatagctcattaccagcccccagcaatcataatgaccaagtacgaacgggcgctcaaggagaggcaattctccgcgtgggtggatggtacgaagatcgccttccggccagctgataatatgccacgggagcagcgttgcatcgcactgcgccttatccagttcgctgggttgcgtggtcgcatcaggatggctgtgaacaatgccgataatcgtcccccagtcctctactgctgcgtaatcctccggcgccagtacaaaattatcatttgactcgctagccaggtttctgcagggaaagtatcgctctactcgccccttttgggcaatcaaaccgcacgcttcacgggggtaatcagctgcagcatgaacctgtatcgcctcaatcgttttttggcgcatatcagctccttatcagcgacgtgccggggaacccgccaaacggtagttcgttatgctcaccaaaacgcagtttgcaggcagtgagtgttccgttgcagacgtccttcgatggatcatcaaccggcttgttattcttgtcgaaatactttgtcccggcataatcgcaaccatcgccactacggtatttattgcgaatacaccaggtacaaaccgaatgatactgacgagtagggatcaatttcccctgcaaccccatcgggctatcgagcgcgaactccaccgtttcatcggtttcaagacttttggtgtcgataaaatagaggtgccgtttttcctgcgttggatccgcggtggcattacccgcagggaaatttcgcgcatccagatactgcttttgtgtctcatggataatgacccgagccatcgccaaatcgtcataatgcaaacacaacgcggaaatcgaaccatcaatgttgcccaccctcagtgtcggctgcgcgtcgcttcctgaagtcgaggattcgatcccctctaattcacacggccacgctttatattcggtgccctgccaccagatacttttagcgggcaattttgattcatcgccaccagcggctaaaatttccgcttcagtatggggaatgttatatccgtggaaatataaaatatcccccatattaaaagcacttccgtcaatttcgaaaagccggatttcatctcccggctccagtttttgataatcagcgtgaagactcatggtacgaatgcctgttcaaatgttgcggtgactgtcatgactttgctattcagaatggctttttgcaggctgtcagcctgaacccgccatagcgctaactcgtcatacggtggtttaaaggcaaaggatttagttttatgccgtcgcaggaatttataaatatccaggccggtttgcagatctccggtaaatgaaaatgcataatttaaggtttccgggtttattccctcccctgaaacctgcgcatatccatcgccaaattgcgccttgcgaatattatccttactcgttgtcgccggctgactggcggcctgaattcgccaggaaaatgtttcaatagtcataaatagcctttatctccgccagtaaaaaagccgcaaagcggcttctggtattaacgcccttcttttattgccttccagagtggcgtgccgggccgttgggcctgttcactgacgacactaatgatggcgggtttcagttgcttgaggataccgttactgtcaatcgctgaccgctgcgtagactgctgttcgttgccactactgatatagacgccgcccatatggaccattacaccgccaggggacacacttgctggactggaagcgttgccgacatacccgccggaggcataaccgcgcatcatccggtaaagattactcacgccgatgcggctggttgcctctttggtgaaaacgaactcgccgcggtgaacaaccccggcgggctcgtacttaccaccatgcccggtataaccgcccccatcaaagccagagggacgataggaaggaacggcaaaagactgaccagaatttgaagaactgctcccgccgctgatccaccccatcgcagcctgaaaggtgtaggccacaataagctgatcaatgacctgagcgatcatcttcagaatggatgtcgtgaattccttaaaactcgctttgccggtggtattgagcaacgtcagctgattgaccagccccccgaaggtggcctgggatatttgttgaacagaggaaaatacattagtcgcggaatcctgatactccgcccagccctgtttggcgccggccagccagttaccacgtaatgcatcctcagcttcataggtggcttgctgttccgccagcaccttccgctgcgcatcaggattgaaggcgtacgtttcactcagcttttcaagcgtgctccttctgttcgactccctgccagaaagcccctcggcctgagccttgatccccgcccggaccgcactctgctgctgcgcgaatttattggcctgatcagccagattattcagcttctgctgccggacgaccttatcaccgagatcggccagctggcgtttgtattccagcgtttcgtttttgtgggccagcagggatttttcctgcgtggacaactggcggcggccggcggcctcctgtaaaacggcatactggttttccgtatgccagaggtcacggcgctgcttactgatcacatcgttaacgtcggtatgctgctgcagggttttaagctgcgcctgtagcgtcagcagctccgcctgcgccccttcctcagctttactgccagcgggcgtagtatattgcctgcctttcggcgttttcggatctttgtatttgctatcgatacctgcgcggattttcgcgatatcgctgtccgtccagcgggtagcaatcccatcgatggcatcctgtttatttttcgcaaccagcttattaaattcttcctgagcgcgggcccgccgctcggcaggtttcaggccagcgtcaagaagctggttaaactgctgctgattccttattgcctgctgctgctggtcattgcgcagcttctcgcgcgccgcggctaacccctccttagcgtacgctttgtcaatttcgtcaaacgtttgttttgccagcgcttcccgttgagtggcattacgtaaacgttcggcatcggctttgattaacggattattaccggagtagttgggatcgacctttaagttggcttccagcgccctgcgttctttttccgcagcctgccaatcagcaaaagcaccctgccgcttcatggccgtatcaggattgcgaccaatacccatcatggcatcccaggcgccgctggcggcatttttcacccagttccacgcggtttcaagtgtccccagattttccttcaccgcattcgcacgctggataacactgtcggaataggcgcgcatcgcaagttcggcagcccgctgcgaatcccccattgcctgcgcagatgaaatctgttcaaactggcttgcggtcagaaaatgcagcgactcattcagcgttgcaaccgcattaaccggatcctctttcagccgtttgaactggttaatagtttcatccaccgcctggccggtcacctgctggagccttgcagccacattggcaacacgctcgacgtcggctccaccgaatgccccacttccgacaacctgcgctaatacggctgccgcggcgtgctgagtgactccatttcctgagatgttccgtgccagcgcctgcagttgtcccgaggttttcccggcatagttcccggtgagaatgagctgtttgttaaactcctcggcttccttcccgccctcgaaccatgcctttcccagcagaacgacggatgccgcaatgccaccgacaacgccggcgatccccagtccgcgtagcgtcatcattttttcgagccacccggcctggttcgccagggttatcccggagccacgcaacgcgccgaaattaccacgcaataattcccccgccagcacgccaagttcccgacgtgcgccagcgctctcgagaccaaggctgtgcgtggcgaccttagctgcttccagtttgcggatataaacttcagcggcatcgccggcgcccacctgcgccgctttcattctcaggagctctgtaccagatagcttttgctcgacaacctgcgccttcagctggcgaagaaatttctcgcgcgcctggttcgctttttcctcaacctgctgaagctctttctgccgcgccgtggtgcgggaaatcagggagagataatcaccctgggtgatgtttccctgtgcgcgggccttgcggaattgttcctggacactggccagcgaccgtgtttctccactgagggatcgaacgccatctatctgccgaaagaacgattccgccagcgcatcctgccgccgcgccagcgcctcagcctgcgcgtcgttctcacgataacgctggtttaatccggtgacgcgctggtaagtctcatcgaccgatttggagacccgctgcagttcgctctgaagcccggcggcggcatccgcctgtcgcttctgcatatcagacacagcccctgcgctggcggcgctggtggttttcagcgcgctgatttgcgcctctgccgcactacgcatgcgcgtctgcactttgtccgattcatccgccataccggacagttgccccttaatcctggcgatctgttcggtaaatgtggcgctgtcgacatccaggttaatgacaaggtcgctaatctgctgggccatatctggtgcctcctgttattccctctgcggccagcatcatggcgtcatcgtcctgcacattatccgctgctacctcagcagacggggacagcaagctgaagtgtgcaggggtgagatccggatcccggtataagaaggttgaaatggtgtatagcagcccggagaaatgggcatcgagttgcgcgtcctggaaataacgctcccggtaaaagtgatgccagtcgcccagctcggaggacgtcatgccagcaagcatggcgcgccagtcgggccgcccgaactcacgcgccagtttcaggacaaaatcaagctcgctggctagggcttttccgcagtaacaggttcatcacccagcgcggtggcatcaatatcttcatccgtggattgctcttcttcggcaacaggcgccagcatgccggagagcagcttgatctgcatttccgctttgccaatcgcttccgccggccaggtactcatcacctgctggtggagttcctcttcagatggacccttcggatcgttatgccagagcgagagcgcaatcaggcgcgcgcctgcgcgaatactcatgctgaccagcccggcggacattgtctggtcatccacgtcatcagaaatggcggataaggctttttcttctgcggccagatattcgagataagtaatgcgctgcagtgccgataattcagtgatcgtcaccgtagcgccgttatgggtaaattcgtctttcttcaaaaacatgctcatgcctttatcctcaggacgcagtcacggtggtcttgcaggtcgccacaaaattaccgtcattgctcatgacaataatgtcggccgcgccagccgccacgccggtgacaatcagagatttaccactcacggccacagtcgccttcgcgctatcagaggtcgccgcacggaaagactgttccgatgcactggcaggcaggaaggtgacgtttagcgttatggttgcgccgacggctacgctggccgttgccttgtcgagtttaatgccggtcactgcgatcggcgggttgccgctttcttccgccagttccggtttcccggtattggtgatttttgcggtacgcgtgatcacttccttcgcggggatggctttacccaggctactgcaccaacctttgaacacatccacggtgccattcggatacttaattttgtacgcccgtacagagccatcgacaaaccaggccaccagcgatttttgaccatcctctcccggtttccaggccagcgttaatgatgtatcacctgccgattttgccccctgggcggtagcggcccagtccgcatcttcatcatcaagataggtatcatcgtaggactcagccgtcatctcacccggcgtcagctccttaatttttgccaggcgttgccagtcagcatcggacaaagggtttgcataagcgtccccggtccccgtgtacaaccagagtgtagttcccgccccttttaccggagcaagtggattaggtgttggcataaatcctcacatgtcataagtaattgaatatttcatatctgcggaactccagagcccgaggctgtcatccctctgatactcatagccctgttgcaccatcacggtaatcagtccattcagcgcggagatacctgatattgccgggtaaacccgagtttccatccattcatcaagttcggaatcaggtacctgggcaggaaggaaaacttcaatatgtaaagtggcctgccaggtatcagcatccagttcctccccggtgtattcggcatcagtcagataaaccgccacagcaggaaaatcttcttcctcaatgacagccggacgaccatcaaaaaaaatggcgctattccctatcatgctttccaggccatcgatcacggcctggcgtatttcggtgtgtttcatcgtttaaggtgtaacctcagttgttgcttgagcgcagcggccagttgctttggcatctccacatcaagcatgcgtttcttttccgcttcgaaagcagttgtaagcggcgcagccagtgggattttcacaacatcgatggggtagcgatttttcccttcgatacgcttcatgacatgccagcgaccgttggctaattgctgaatgaaagcgtctctgaaaagatatttcccaatcttcaggacaccccctctccgtagaagcgcccctttctttctggttaagcggacctgggcagcacccagtttgattgccggcaagttaccccggttgacctttatcctggcgttcattcggccatttgaagatgctttgctgacccttaccctctgtttaaccagtttgaccgggaggcctttaacgcggttatcccctgcaatggtttccttagccacttttcgggttgcagcggtgactgctgttctggctactcgattgattgcccaggcgctggcattaggtaccatgttgcgatcaaggctattcaggtttgcaatgacttgttccagccccttaatacccattacacctcctatcggcggcggtttcctgcggggggatgcccgttacctagccagagatggcaggatccgcaatcgtccggaccaatcctgtcaatccagtaggagattccgttaatggtgagagtatccagtcgctgtaactcgcgggcatctgtcgatttcacgaaaaaagaagggcttgagccctccactctcacaccgggaaccgcatagccaatattttctggatcatcaaagacaccggaaatactcagcccggaaaacccgcccgaggtgataagcgccaccgtccccatggttgagcggatcgtttcatcggcccgcgatatagcagcatcgaaaacattatcgaaatctgtcatgtccgctccgctacagttcgacagccagcccccgtgtaatcagctcttctgcatccccggcgctgacacgaacggtggttcccggcaaaacaaggctcaacgtttcattttttacggcgtgcaatgcttcgaggtgtaacgtcgtgagcgttttcaccgcaaccaggtcatctgaagcaaactttgtttcctggggcgccagcgttaatgcgttaccctgcgcatcgctatccttctcctcactgccggatgccgtatttccggtccccgtttcattgctatcgccaccatcgtcgatatcatccccaagctcttcttccagctcagcaactcgcagcgccagttcctcttttgatccggtcagactgacctcacggttcagcatactgcccagctctttcagacgggctatcaactcttcttttgtcatcactgttacctctttataaaaaaggccccgaagggccgtggtccagctcgttaggccagttttacggagacgaactcatccggatcagccagcaacataagcggtgctgactgaatcatggtgaattcacgtgcagggtctcccgactgaacccagttttttgggtagcgagttgaagcgttaataccttcgcgctgggcgtctgcatcaaggatgcagccataggtgcgcagaccacgggcctgggtgttacccagtaccatagacaggtccggcagagcattttttttgacgtcattttcaacgagctgaccggcataaaccacaatggcgacatcgccgtacatgcccttataagaaacagcattacccaggtctttcagggccgtttccagttcagaattcgagccgcggcgagtatccagcttctccttaacggcatcgaaagaacggaacagtgcccagcctttcggatcgaacacgataatgttgatcgtaccgctggcgtttagcgcataggcttcaatgtcatcggtcggatcataggtttttttatcacgaccagaccatgctgccgcccccgcctggataatgttattgccggcactgcgccccatatccacttcaactggctcaaatgcttccccactcatggtgtatttcccatagagcacagcttcaattgcttgcttctcttcgacctgtgcaatcgccagttcctcatctttcatattctgaagaatgatgcggcgacggcgataagcaggatctgccagtttctgtggatcttcatcgggcaggcgacggagagtcatttgtgggttaacttcgtgtttcggcttcacatagccaggtgtaaattctgacgtgctgccgccacgagagcgaatcactttcccggagacaatcggcgacacatacagcgccatgttgaccaggcctggaatttgcgacaggtagactttctctgtagtaaagggataactttcacgaaagaagatgcgcaggaaaagcggatcgaatttgaatttcttctcattgaccgccagcagttgggctgttgtataaactgacatagatttttcccgtaaaaaaagccgcaaatgcggcttttatgaatgatgaaattggtaaaggagtcggttaaacgatgctgatagcagtgccagcaaaggcattacgtttaatgccgtcgtcggtgactgcatccggccagtgaatatcttcaacacggaaggagccggatttataaaaggtaagttctgtactgttctggtcggcggctaccgccaggatgccgcatgcagcgccggcatgctcgccgtcccaggcaaccagttttcccgccgtcgcctccagcattaacggagtcatagcgggcgtttccgttgccagtgcgccagcgccataagcggtgtgggctggatcgctattacccagcggctggtaatgtgtaaactcttcagtgttagccatatgagcctcttaaacaggggtattcatcaaatcatcggtttcactggcagccggtgctccggacgccagcgtttctggtgcggtttccatcaggcgatccagagcggtttcgcttcgggcctgtgaactttgcggcgccgccgccagaatgcgttgtgcatgctcaaccgtcattcccggcgtttctgccagcgcacgggcctgttcctcccgaccgcttgcggcctcacagttcaggatccccataattcgggcattctcagcagagaccgccgcggcaacctgagcatttacatccggtgtgggtgcagccgctgctggcgctgccggatcagttacaattgctccattggcttccggtgcggcattggcgtctggttgggttgcagctgcattcgtcgtcgttgtcttcatcgttcctccgatatggatggtctttttggtatccagcgcgctgcgcattacgccgatcgcatctgtactgttaacaagttcgtccgccagcccatgatcaatggactcctgcccggagaagaccgccgcctcagtatcgagaaccgccctcaccgacattcccgtataacctgccactttttcagcaaacatctgccgggtggcatcgatacgggactgaaaagcttcacgaacatcttttggcaatttttcgtaagggttgccatcaaccttgtggtcgccgctgtaaatcaacgtgacctcgaccccctgagatttcagcacctgcccataattgctgtgggccatcatcacaccgatggatcccgtccttgcggtctgtgtcaccagtcggcgtgatgccgcactggcgataagctgcccggcgctgcagttcatatcgttcgccagcgcccagacgggtttaatatcgcgggcccgggcaataatatcggcgcagtcaaacgctccggcgaccatcccacctggcgtatccatatccagcaaaacaccatcaacatcaggatcgctgatagcctgctgcaggcgggcaattacaccgttgtacccggtcatgccggaatacggctggagtgagcgggttttattgaccagggtcccggcaacaggtaataccgcaataccattcattacctgatagctacgagccgggcgtggcccggcctcctcgttactgaatagcatcagtggttccgccatttgctcggcgcccagggttgtccccgatacggtatcagtcaggcgggtaatgcccagttggcctgccagcgcgcaaaagaaaacccgcgcataggcgggttcaaggagcagcggttcgttaaatgccaggctggcaatatgtggaaggttacgcagctcgggcgtcatcttgttcctccttaccggaattctccagaccagactggaacgccgcagctgcccacgaaggcggtcttaaccctgcctgtcgccgttccatcgtttcacgcacctgctgggcaaagatttcctgataatcatcgccgcgcttcgcgcactctttttcataggtactgaggcctgcttcaatcagcataaccgcctcctgcacctccttaaggccgtcaatcgccatcctgccggagccgatccagtcgcagttcgcccagcttgtcctggcctcctggaaactgtaacgggcgcgggatggcaggctgacgacacgacggacgatcgcctcttccagccagcacaaaaacatcatgctcgcctgccgggcagcgataaatttgcgccggcccatgaaataggcccaggactcattggcgctcgcgcgtgcggtggagtaactcatctgtgagtagttgcgggataactgctcgtaagaaacgccaagccccgcggcgatgtaacgtaagagcgattgctcgaatacggaatacccattatcggtattctgagcagactgcagattcagtgaatccccgggcatcaggtgtggcaccttcgcccctccgagtctgaccggggcggccgcataatacgttgcgatttccccaagccatccggtcagttttttcgtctgctccggattgtccgcaccgaggataaaatccatcgctgtctgggtatccatctcactttcaatcgtggcggcatacatcgccttgacgatggcgctttgcagttgggtgttttgcagcgtatcgagcattttcatctgctccataacgctataaaactgattcgctccccttgactgtccatcttccattggctcaaacacatggataaaggccgttcgcccgccaggtagttcacgcggaatataattccacttctgagccatccacccgggatagttatcctcgctgacgtagtaaccctgggcggcaccagcatcattaatctttacccctgcccggcaatttcgggtatcgccctgattgcctggattactgatccgcttaggactgaccatcttaaactgtgttcgaaatagcctgttcgcgctggtatcccaggtcgcctgagtaaataactctccgttaaaagtgtgcatggccaccccttcacggatcatcatggtgaacgtgcgtttacgttcggcatcaataaaacagtggtcgtcctccgcgtattctttccaggcatcctcgcactcacgggcaaacgcacgcgcatcctcttcgctgatcccaagatagcgccaggcaggccggtggctaagacggaaaaatgaaccaacgatatgatcctggtgaagctgtaccgcattcgccgcgaggccgttattacgaacaagatcgtcggcgcgggcgtttccacgctggaagttcggcagtagtgcggcatcaccactttcactgggtggattccacgcgcgcagctggccaccaaagccaccagccccaccatggtatccggcatattcccggagcgacgttttaccgtcgggtccaacaagtgctggtaatttcatgcgtaaaatcctgctggcccgcgccggcgactggtgatgccaatctgaacttcaagttcggcaatatattttttcaaatcagcaactgacgtggcagtaaactcaacgcggcggccatctttctgtaccgtcgcaacgcgtttccctgtcatcaggtcatgaagtgcggcgcgggcactgtccagttcagactgtgttgccattattcatctccggctaatgcccgggcataatccgccagggtctttttcggtttagaggtaagttcgtcctcctgcatgcttatcagaagagactcaagattcagctgccagcgggagacacttatccgcagagctgccagcgcgtagacaaaacagtccagcgcctcgttacgacgtttcttactgtcccagagtattttccgctcgccgtttacccatttttcaacctgctcctctgctgtcagctgctgagcctcggtcaggtcgaagatttccgggttgttaggaaaatgaacggcgccggccattggctcatcaccaaccggaataagcgttaatcggttataaatctgctccttcgccgtatcggtaccaacctccgtcagatacaccccgtttttatttcgtttacggggcatattcgctacaggtttaccgtatacagaagcacctttgatgggaattacgcgaaaaagaccatgctttttcgaacgattgtaaacgattgttgggtcaatccccccgatatcccagcagatgcgggaaatactcatctccgcgccatttcggcgtttataggtcttgttgatcgcctcatcgacgcgttgaagagtctgctcgtcatcatgacgccccattattatctgtcggtccaccagccagctttcttcaccaggtccccaaccccagactcgcatttcataacgatcaagctgtgagtcaattccggcagtaagatagacaacgcgatccggcactgcggcagcaaagagttcctttcgctcttcgataagatcggcatcaggtcgttcaccaattttcgcctcccaggtttccccgagagtggtattggtgaaagttttgcgtttgcctgtatcacccttggttttaatccactctttaacaatctgcacccatgtggtgaacgggctgtaagccgtccagatatggaaggtcacactgtcaggcgggtctatttcgccacccgaggaagagaaccagttaagaccgtcatccgtccagataccggttcgctcgcagatatagcgcgcatgagtgaaatccagctcctgttgcttaatgacgcacccgttatgctcgcacaggtaaaaaacgctggcaggctcaccgggagaccatttaaaaccaaaaggcgtttccctatcgccgaacttgaggtattgctcttccccgcaatgcgggcacgcaacatggaaacgcataaaatgctgcgattcgctggcggctcgctcaatctggcaggtaccacgaatttttggggtagagccgcggatcgatttgggccagacagagccctcaattcgcttatcacccagaaacgttggcgaaccttctttctcgatgtcctcatcgaatgccgccagttcatcataaccggcaacatcgaccgatttctcacggtagttcttggcagccttaccgccgagacaccagaagccgcggccgttagagaatcgtttcatgctgagcgtgttattgcggtgctttttcccataccacggtgccagcgccagcaatgctggaatatcacggatcgtcggctcaacgtgcgacttcataaagttttcggcatcgccgtcggtcggcagccagatgagggaatttcgctgtttatgctcaataaaataggaatagacgcccagcagcatctttgagtaaccgacacgggcagatttaacaacgttcacttcccgtatgtagtcatttcccatcgcattcattatcgcgcgctgaaaaggcagcgtgacccagcgcccttcctggtatgccgactctttcggcaggtaataatttttgtctgcccattccactgccgtttgcggctccgggcgatagagtgagcgcagcccggcgcgtgcggatgactgcagccccttaatctgactgttcgatatattcactcagcaaccccggtataatttcatccagcgcagctgccttgttcatggctttgattacgtcctttttaaggaaatcaatgtgtcgattctccagctcaggaaaccgccgctgcaccgacagggggatcccgtccaggatactggctatttcgccggccacgcgtgaaagcacgaacgtgcagaatgcggtctccaccacctcagcggaacttttggcgttttttagctcctgggcatcagcctgcgaccgggtcagacggtagcgctcataatcaatcgttccaggctgtagctctgattcaccagccttacggagctcttccacttcctttctcaacttttcgttttcgatatcagcatcgcgctcggcaaaccacttaatcgcagcggcggaatcgtaaagcacctcattacctttgccgccgccgcgtacaaccggcataccctgatcctgccagttctggatcgtacgaacgctgacaccaaaaatatcggagagctgttttttgttcacctccatacgcactccttgagcgaaaacggggtacggaaacgatcttgagtgatccgggcaggaaactaactcctggtttcctttcttctcatataccaaccaattaataaacaatgagttacacagaagaagaacggaaacgccttaaactcagaaattttcatatgtagcgagaatccgcgaggtcgccgccccgtagctactcgaactcccggaaaggacccgcaacgataacggttatcattacagcttgaatggttattcatcgaagccactcacagaatgacctctgtgaatgctcaacttgcggatgcgccgccgtcggcttgcagcacatcctcggggatccgcgccggcaggggttcattctcgaagaccttcaacccattgaagccgaggaacgttgaggactggctgatgtggcctgcaatgaagtcaccaacatcgaccagtaacccggttacgaccgcctcagtgttctggcgccagtagctctccagagcaaccagcagcggatcagagccattggagaccatctgctcgccgacagaataagccttcttaccagccttatcagtgatgcactgcagcttgttgctctgcatggccaccatgtcggaattgttcacctgaacggtcaatgtcgcgactttttcgccttcctcattcgtgctggaagcatagaaaagcgaaagggtcagatcattacgattaaacattactggctccggttgcggttacggttgcgatgacggggacgacgcgccggtcgtggcgcgctatcacccggcggcaagagctcaccttcttttgctggctgcacttcttctacagcagctggaggatgttctggctctgccggttgtggttgccctgcgggtacgaatggtgcgccaccagcttcaatctcaatcttgaggtgcgggaaaatcttagccgtatggtcgaaatggatagctgacacaggcagatgcgcgtaagacacgccgtcacgctccagcgccaccagcgcgccattaacgtattcaatcttgatattttgcatcacgtaccttcacgtatagaaaagccccgcgtatgcgaggtactggttaaacatcagggtgttactgatagagcgcagcgtgtaaggttaactctcagcccgtccgtggtgggacactgacgaacacatcaatagcggaggaatggttgaatatctccgtgcaaggaaaaaatgatgaaagaagaattcgtacctgttaaaaatgaagtagatacctccagtctggaggcattaggagaagagctgaaagcaatgcgccatgcatacgccattctgtttacacagctcagcccacaaattaaaaacggtattatctatcagctaaatgggttacctacagatgcggccaaaagaatgggacgctatctctcccagtttacaaagtttgaaaagagttagaattcgtaggggtacattacttattaaatcaactcctctgctaagagtgagatgttcaccagagacggcaataagaaaattctgttcaaaggctgactgccaaaataaacatccggatttcaaactcgctgtatccagtgcattgaaaaatccgaaaaatgtgataacttcacttcggaccaaaacgataactgtttttattcatattacatctcgccctgttcccccataaagcagggctatttttttatttttcttccagcaacaccaacacaaacagtatggaatagatgcatcccctccataaaaaaggccgtatcagcgaccgtagcagatagtgaaaatttatttccacaatcaggcataaaaccaacccaatacgccaatcataattgcaagtaccactaacagtattgctgttttacgcatatggacgccataaaatgcgaaagccatcccagtacaattaactattaatattggccacagattaagtagcaggaataagtaagcttccaaattgctgtgaataatcacaattactccgaattcatccaatcaccccttccatagtccaaaacttcgtcacatgacaccatgtgaatgcttcttataagatctgaactaatcacaggattttaacaaatgtatgcatttatgtaaccagaagatgggaaaattactccttagctgagatagacgttctcaccgattcgtaaatccgctcgcaggtcatccctgctgtgtagcgttcgtcagcgattgcagcatatcgtcgagcctcttctgcaaggtctccaagcatgtcggcgagcattccggcggtggcgccggttgttttgcttctgacggtagcggcgagactcgcggtgtgctttgcggcgtccaggcgggtggcaaggtgttttgcctgctggcgcagctggttaacagtgccagagagattagcggcagcagcgcgcgctgcagcggtttgggcttgagcatcttgtacggcctcatcgcgggcgatcaagcgcccatgttcaatcatccgagcggcggtttgcgcgttaacttcctgagccgattcggcgctatcacgttctgcccaccgcttttcccatgcccgatcgctccaggctaaaccagcaacaaaggcaccagcaataatcaccgcggcgatagctggctttaagtaagttgcattcactggtcaatcccccagcacgtcagcgcactttcctgatcccggcgagttacctgcccgtagcagttattagagcgtatgcggcaatccttcccaccgtccttaatccaccagcgaatcgcttcacatgcgcctttacggtcgccggcgttgatgcgctggtagaacgtagacgggaagcatttaccggggccgatgttgtacggacagaatgaagcaatgccgactttctgcggaggcgtcaacggtacgcggatattccgatcaacccacgccagcgccttatcacgttcgatagcattcacctcatcgcatttggcctgggtcaacttcattccctgcgtgacgggttttccatcaattcgcgtggcgcctcggcaaatagtccagatcccctggctaccatcgcgataagcggtaaggctgttaccttctttctcatccaggaactgatccatcaaagttggggcggatgcaccagccgctattaatcccagcatggctgcgctgagtttcgttttcaggttggccatatcagtgatcctgtggtggtggcgttacatagcctcgtgccagagccttttcatatgctctggtttggcgccgcttaaaataaaagttcacaaagaaagtcagtaagccgatcacgaagccgccgacgaccgcaatcaaattccagtcgagctcatgtacccatctggcaatgccgccccagcagatgaggccgcccgaagtgcaataccctactgcagaggcaattttgtcaggcatggttctgttcatccgacacctcctgttgaggtgctatacgtgtaagaaagaatgaatatcgaaggcaataaaaaaggccgccaacgcggcgaccttttggttaggggagatggtgattaacgaacgacaatttccatatgctgtcccagcgctgccagagctttttgaatcgtatcaattttggtgctgtgaccaagcgatacgatgcgctgtacttcctgcggacgcgtattaatcatgcgggcaagttcagcattgctggtgttggtgcttaccagacgatttagcagcaataccttcgccgctacgctggacggaacctcaacaaatgcctcaccgtcagctgatggcgcgggaatctcccggcgatcgtcgaagtagaaatcaaacgccgttaccagggcatcttgcgccatttctaacgcttcctccctggtctctccgcccgtcattgcctctgggatatccggaaagaataccgcccagccggtttcatcatgttcaaaaattaccgggtatcgcatatcgattaagtgaatctccgcgagtaccagccccgaagggctggattttatttgatgccaagttgcttcagaattgccttcctcagcggttccggtatttccttccccggatgtctcggcattaccgtttgcttgccgttgaggtagattttcaggtggttagtaccatctttaaactctgccccttgagctgcaagccaacgtctcaactcgctttgcttcacttcctcctcctgtctgtttaacttgagataagcataaacatttttgtttataccatcaagcaaaaataaacatttttgtttatacaaatgacagggggagctattgcccaagatctctacgccacagtgaggcgatgcaaatcaattatgcgatatacgacgatatgacaggggtactgatgcaatgcatctcgcgaatacccctgtcgtatcgccggaaagcaaaaaccccgcaagagcggggtttttgttgtaatcaaattgtcgcttctttcgctgccgagtggcgcagctctgccaagcatgaatggattatctgattttttggcccattttcaacatcaaaaggtatttatagcactttttgttaatcatcctgaattccctttcgtaccgacagaaatgtttttgctctgaatatttccaggcaccatcgcacgcgcttgcgggcttcaccgtctgttagccacggggccaccagctgtaattcccgggttatgtcagagatttttttgcgtgtggtgtaataactaactcctaccagataaaccggatccgccgcttcaaatgcgccgagaacacagcgctctacgaattcggcatcatcatcatgaatagcggaatctatcaggccgatgactggctgaggccataaaatcgcatgtgctcggtgtaaggcttgctggcctcgatatccctcctccctcgcctgttctatcgctgcagtaaatcgctccagcgccttatctgaccagcggtcccctttcaaacctcgccagcaggagtggcctgtgggctttcggggagctgttcccccacgcatgctctctccccatattgtaagtagcgatttaatccaggcagactgaatgccattcaggggcgtaaaccggcctaaccagcttttgcgaggcgcggcggccactgtttctaatcctgcgcgctgcagccggcgttgacgtggtgtcatcatgctcttctccttacgccagaacgccgagcgcataggcccggtccagcaatttaataattaattccggctgactgccgtactcgcgctcgaaagcaactggatcgtgatgaagcgtccggtgatgcttacggcaaagagggatcgtaaaaatatcgtgtgccttggtaccaacgccgccctgcccccacccgataaggtgatgcgcatcgtcggcagactgaccgcagcacatacatggctgagtctttacccaggaaataaaaccatctgacacccagcggatccgcttaggtctggtgaataaagtggctggtgccacgggatcaacaaccactggcacctctggttttaccggggctggtggttcaggatgtctggcaaccttagcaacaagcggggaaagaatgctggtggccggcaccgatgggacgatttcgctttctttgtagactgactggaaaacttcttctttaagccggagggagcggcgcgccatctcttctgtgatttcgtcccctattccaacgctgacagcccaccagcacaattcagcaagtgacagagagcgttcagggtcaaatcccagtgcgatacgggcagcaccgattatcagatctgcgttattgatacctaccagcctatcaagggtttgatcggtctggtacttcagctcgttatcacaatgccagcatgcgacgattgccccggttgaatgccggaacgttaccagctctgaatggtgataatcagaatgtggccactggcaatgcttaaccctcgtaagcaaccaggattcgagactattcacaccaccagcagccctcactacccgctctttcataaagaatggtcgaatatcaggatcatctcgtaaaggttgtccagcgtcaggaatgcgcccgcttggtagagccttcattttttctggcagagtctccaccagcacgcgcccaccgttgaataaagtcatcaactctttcccgggtttaagcaacacaattcccaggtgccgggcaacatcaacatttagtaatgcgcgcatcagtccctccacattttttgtgtgtaggttctgttaatgcgcggtggcttgctggattccggcaacagcacacggagttcccatgagataaagtcgctcgacaggcttttctcaaccggacaattctttttccggtagcgttccgccagttccagagcctgagactctgaaagttgttcatggagaaaccagcttttcttcatgggcgggcctcgtacactcgcaggaactccagcgcccgatcacgcaccccaggtgcgtcagcgatcatttcctgcagcagctgcacggcaagtaatggttcctttcttccgacgacagaaatcccacgggaaacaccgcgagatagttttatgaagttttttttatgtaacgcacgaaggtgcaaagcgacagcattcggtgagctaacgccgagaagcccggccagttcctgaacggtcggcgggtagccatgctgattgatatatgccaccagcagatcaaaaacttcctgctgtcgtggtgtcagattgtggaatgaagaaagaccggcaccatcaacatgatcgccagcctgttccgcatcagatattaattttgtttgcgccatggtttctctccgtgacgcagcaggtataggttgttcaggcctatgacgggagtgtaacagagcccggtggaatctggtaaccccctccggcctttgctctttcaatcatctgcgaaaacagcgagagagtccccacgatctcatcgggctgcagaggcataaacgaaacagtatcaccgcgacggtacattaaagcgcgctcacatacgggaaaagaggtgagacgggcaacaattaccccgtcatcgcatctgattactacatagccggtgttcggcatttgttgttttttagccacagcaaaatcctcaaaataaaccaggtcagccactggacctctactcaatagaaccagtcgtcagcactttcccaggtatcctgaaggatttgctccactcgctttttgtccccatccatcccaccaaacacactcagaccatcagtaccggttcggcgaatgatcaaactgcagttgttaaagttttggtcaagcctccgcagcagctccttctctaatgccgggacagcgccctctggtagctttttgcgacgatcaattgtgatttccactttcatgattatctccttacgcaaatactgtataaataaacagtatacctgttaggagaaatgttcaagcccttgatatcactttttgctaatcacatgcccatgtttaacttgaagttttcccaaaaaacaaaacccgccattggcgggttcaggtaaataattccggttacgatcgtaccatttcagtatttgtaaatcataaagcagtattctgccccgtcttctcaggtactgagtagttgtcaaatgttacatatgtagccgtatcaaataatgaaacagcttcaacctggtccataggtataacatgacgaaaatgctgtaagttcagccctctctcatgctggttagcggcaatacccttttcaagatataactcgtagtaacgatgttgctcatggtaacgaagggtatctttatcgcgatacccgcttatatacgggatgatagctaaatgctgcgtgtggctatgctcaatacgaggtgctgcgacatagccaatgtatacttttcgtgattttaatgtgacaaaaaccagcatgtcttcatctatagcctgtaccagaagagactccacaccatccatagcggccatctcccggtaggctgcctgcctgacagactcatctttaatagcctttctggctacatcaccagcaacgtatgccataaaacatgaagcagccattgaaagtacaaaaaatacaggatacgagagaatttgtttatccgtgagccacgaataaaaatccagtgctttataactttcgaaaaacaggtgaggaatcgagaggaggagactgatagtaagcaagaggagataaaaaaccagaactaaaccaaacccctgaacgacaaatttacatccatgcattgcaacatagaagtacgacgtccagccattagttcttgcatgacgtatgcgggattgatagtgattctccgtataccaaaacccgcatacaagcacaaccattatgaccagtggtcccatcgtttatccttaacgtttagctgcaagttctttcatcctagcctgcattgactcacgaacttctttattgttcatgttcaggactgcgttaccattagcatcagtggtgattttactgttgttagattgttcaatgtcctgctggatgacattttgcatccatcgaccgggggttgacataattttagcaaataacgtagtcatacaacctcctcgctatgccagcattgctgtgaattcttcttgttattaccttattgtagagcatcgtcggatcataaactatcttatgggatcgcttatctataacattttgagcagtccagcaagaaaaactgaagatgattcagtcaatattgttaaaacatctatatgtagtgtctcgagtaaaggaaagcaactaacaagatacatcccagcgaatcaggccgaggatgtagcgcgaatactcaataccacatggagtagcaggattccctactcggcctttctttcaaactcactttcacaacatgtgaagacagagatctccgtttgaccattactgagctcgccagagaagcaacttgggacaacgtaaagaggccagatagtgctcattagcgtgatgaacaatgttgaagctaatcaaggtgtttaaaaaaaattgatttttttcaggagaaatccgatatcttgttcctcaacctccagaaatgaagaggtttgccgagtagattcgagaacaagcgaaggaaaaacagtggaaaatcatgacgtttatatatacacaggcgatatacatcgggatggttaccaagaccttaccaatgctataaagatacgaaaagctaagcatgggctgagaaaagatgttatcttttgcttagccacctatggtggggatcctaatgcaggttatcgtataggtagggcattacaacacaactacgacgatgttactttgttagtagttggtccatgtaaaagcgcgggaacattgattgcgattgctgccaataagcttgttataggggatatgggagaattaggcccgttagatatccaactgaaaaaaaatgatgaaattggcgagatgagttcaggcttagccatcatgactgctctagatgcgttaaaagatcgctctatttcagcgtttaactctcatcttgttaaaataagataagaaaatcagataagtactaaaatgtctgctgatatagcgactagacttactgaagctcttgtatcaccgatggccgcccagattgatccgattaagttaggtgagcatcagagagcgatgagtattgcctttacctacggtcaacgacttacagctaagtcaagcattcttaaagaaaatgctctgggtaaactgattgcttcttatccttcacatggttttgtaattgatcgtaaagaagcaaaagaattgttcaaatgcgtggagagtcctagcggtttaaccgaagcactttacacagtattctgcgataaaattcataatggtgacatagcaacctacgggaaaccgacagttgtggacttcacccatgatcctgataacgaagagggagataccaatgccaaagaatctgaagccggagatggaaatactcaacagaatgttggaaagccagatccaggaaagccagaatctggcaagaaaagcagagcaagacctaaacgagataaagcgtcagttggagccataccagttcaacaacctgatggacaacaacctgaagcgtgagctctttgctctatgacagtatctttaatccggccttctaggccggattccccagaatctttccttttgagctttccataacatagtccagcgaaacagccgtttttgcgccctgaaatttcctccatgccgcctcagccttgcggcgttcctgtagctccaccatcgcttcgcgcgcatctgcattcgcctttgatttaggagccacatcgaagaggaaaatcaactgggccagtcgctcatctgttaactggttattggtcattggttggttcccttcacgaagatgatccagtgggttttatcgttcttcccggtgcgctggccgatcgccggtttctcgtctgtcagagctagaatctgactaaccggtatctgggtttcgttccatttgaatatgagtacgccgtgtggccgcagtacacgaaacgcctccgcgaacccagctcggagatcatcgcgccaggtgtctttgttcagtcgtccgtatttcttacccatccaagcattttcgccaacgcgctcaagatgcggcggatcgaatacaactacagagaaagaaccgtcatcgaacggcaaagcccggaagtcggcgataatgtcaggattgataaccagcttacggtcgtcgcaaagcatatgctgctcggcgcgaatatcgctgaatactgcgcgctcatcctgtttgtcgaaccagaacatgcgggagccgcagcacatgtcgagaatagtttgctctgccatctaaccctcccgcttatggcaatagtgccacccttccggatgtgttgttgtccttccgcatcgcgggcaggtgaacgactcggcggccacggtgcgggactccagctcggcgacgtgcttttcagcaacatccaattcatcccccagtttctgagccatctggaaccagtttgcacgctgatcttcttttgtctctaacgcttctaccagcgcatcaatatcttttaactttacgaacaggacgtcgtggccgaactcttttgcatgggctgagcggcgcttgaggctggctaacaaccgggtaatatcagtcatgctgcgaactccctacctttcgaacgttgtgcctgcagcagttgttcgaacctcattctgatcgggttaccgcaaccaaacggcatatcgtttactctccacgttggggaaccatttttagtgcccgtctggacaatccgtccggtacccgccagttgcctaacctgcccactgacagagctgccactacgccccattgctctagctatttcgccggacgtcatatccggattagccctgaggaactcaaaagcggttatttcattgcgatatctggatttgatttttttggtcatggtcaaaactcgtttacctggttaaacctgccgctttgcggcgtttgtactcttccatcagaagctgtgctggtgttggccctgccggatgtcgcggcgcttcaagctgtcggcgaatcggtgggatcgagaatccattagccagatgcttcgtccacttcgtgagtaatttttctgccagtttttttagttccccttctgtgaggtttcgctcaactccagttctgcgcatctcaacgcagatgtgatacagcacgtcctgtttccaggggtatctgtcgctacccgaatagcgataagactcattgcgccagcgcttgtattcagccatcacagcttcggatgtcaggttgaatgggttggctccactcgccgaaaccagcgctacgaattcagccagatccggtggccatgtgttacccgcggcgcagcgctccatgcactgacggcagaccagggtaatctgggcatcactcatcgatccaatctgggcaatccacatatccgagggcgccgccccgttcttctgggtccaccggttcgaaaatatttcccccataaccgtccacaggcgccatgcagtttccgccgcgagcaagtccgttttcgcgctcccaccgttctcgggctgcctgaatttcttggactgcccgagatctcgtgttatctggttgaactcctgcattcgcactacccccgttaactggttttttctggcggacttccgcccggttgagatgccgggctaacttctgttcccattgcccctgatggaatacttttccttcggcctgccagtaggcaatgaagctacttagctctgcgggaagatttaaccccggctttagcggcatgccccagagcgtggcctgtctgggaaattccgcggatggtttccagtcctgatgcatcgcaaacttcccgaaagtctgactggcaccaaaggcaatcccgggctgattcggataacccggcttaactggttcgaccagaacgctatatgtgggggttatatcttttggttcctctggtagattccggatcccgtttttgggatcgtttgacggaaaaaacgggatcgtttggttgttttgcatacaggaaacaatcccgttttcggtacccttaccagatgtaacaacaccgttttcgggtatgtttaaacgatcccgtttttggtaatgttcccgtttttgggtgtgttcaacttcggcaatgctttcttccacaccaagaagccggtaaacagggatttgtttagtccgcccacgccgttcacctgtatcttcaataagcccaatcgagaccagatattgcagactcgactggactgttttcttatccagttcagttgcttcagccagcgcaggaatggatggaaaagcacagaggtcagccccgcacatatcggccagccaggtcagaactgccttcgcagaagatttcccggttttgacttttttggcccatcgcattgcatcaatgctcatgaatcccccttattttctgtacggtactcattgtaaaaactcgattaaaaaaattgcggcgctacggcgctaatgctcgccagtagtggtcccgccgcatctgcaggaagcatgttaaaaagtgcaattgctgcctctcgtatttcacgctctagcttctgcagaggtgcgcccagcaacttggcctggtgcgcttcactgcattctttgattgcattagccaccagctcggtttcagttaagccgcgttttaggccatgtttgcgcgcgatctctaacggcattgcatcagcgatagccgccgaaagctggatgacataactggtgtacttctctgagccgccctcgtttttcaggtagcgatacagattctgtttattgacgctgataccgcgtccgttttgcttttcccactgttcggccaccaactctgcgacgtggtcttgcgcacgtccaggtaatgaggactcccattcctgaacggcggtataaatggccctgcacttcatgcgatctcggcgcatcggtaaatactgattttctgttttcagctgcatacccttcaccgaggtatgatttcaaaagagatggtttgcatttttatttgcctctcgaatttgagagttctgggggaaatacatcatcaagcgtgcaactaacgccaagcgtattcagggcggcaacgatgtggcgagaatcggctagactcggaacgcgcaaagatctctcatagttggctaaacgtggctgattccaaccagccgccttagctaaggcttgctgtgaaatgttggcttttttccgtaagtgtgaaatttggttcatacagttctcctgttgtgtaaaacgatattcacatgttgtgaaatccatgtcaatacaaaacgtgaatcaccaatattcactcttcgtgataaagtgaggatatgaagacacttgctgaagaaatcggagagcgcatcaaggcgctgaggaccgagaaaggaatgagccaggggcagctagcaaaattatgcggctggtctggagcgtcacgcgtcgctaactatgagtacggcaaccgtaatgttggcgttgatgatgctttgtccttagcaaaagcattaggtaccacgccagtaatgattttatttggtgaacaaagcgatcccgcgaactggttaacagacaaacaaaaaagggttctttcgctattcaatcaattacccgaagcagaacaagaacgtatgattgatacctttgagcttagacttaaagaaattgatgagtatgttgaaaagtacctccgcggaagatacaaccctacctgactgaatccacaagcttcgaatagccggccgcgagccgggcttttttgtgcctgcccccgaaagttacacaaaatgagtaattggagattcacattttgtattgacttatcattcacgtcatgtgaaactccaatcacacaaagcggtaaacagtcatcgaggcaggaagcccacgtagtagctgccggcggcatacgaaacaccggatgagatgacagcaataacactcgcagcaggtttcaacgttcggcgacccggccttaagggaaggaaacagtgatggaaaaggaatacgaagcatattttgaaagcctgtcagaaggcgacgaagtattgagttttgcagagttcaaagaggcgctttcagttaagcggattgatacgactgtaccagagttctaatcgcaaattttgctttgcaccacggtgaatgcggctaagcgcacgcgacacagttaaaaggtaaacatgggcggtttccatgttgcgggaaaaagcaggtcggcagcagttgttaactggctgcagccaccgggaggcacccggcgccgtgctgcaaagcccctgcccatcaataaacgggagatgaatatgacagattttgctcgagtaccgactggccaccaggcaacacgactgaactggtttgaagcaaggctacgtcagctttgctacctgttagcccagaaagggaaccctgaggctaaagcatgaatacgctgtttgcccttgtcatcagcgtgtgcgccctgaccggcgagtgctctgatgtcctgataggcgtgtatccatctgagaccagttgtaacagcgatgctgaggcccagaaggtaaaaggcacatgccagccatacaaaaaggcattgaagacggctgacgaccaacagcctgcagtaagtttctgattcgggttttgagaatgactactgaacaccaccagcctgaaaaaggcccataaagcacaaaacccgcgcaaggcgggttaagtaccccggttagccgaccaaagctttccggattcgagttttgacaatgaccactacccagagggagctttcacagtcccgggtatcttacagccttaaggaacccaaacgcaatgaacaactacgcgtatctcattaaagcaaaggcaaaagccaccgaagcgaaaaacctcttctgctggttttctgctaaatcagattcccgcgccgaacgtcgtatcctggacattctggaagacgctgagattaatgttggccgcggcgccaaccaccagctccctatccgcactaactggctcatcgtggatgatctaccagaagaaggtgtgctggatgacacctggtgtgatcgctacgaacttggcgaggatggattgagctggcaaaaaattgctgctccagcccctgcagagccagaagtaagcaatgaaccggtagctaatccccctgccagcaagaatgatgaagaggactattcaaacaatgaagatgccctgttcaagctggccgaaatgccattccgcacgcagctgctggctcagtacatggccgacgaacgccatgtgtatcatattagcattccacaccgggaccgcctttccttaatggaaatggatacagagaatcacgctatacagaatctgatcctggctgctgaaaatgtaccggatattaagaaatacgatattcccggtctgtggaaattcaccaaggcattcaaaaccgttttccctgaagggaaacgctatgagcttggtaagcaggttcagtttgccaaattatggtttcaaacggcgcacatggaccgcgggattctgactaaagaatgggctgctggtaatagtatttctgccgtaattcgcacgccctccggcgcgaatgccggcggcggtaacgcaacagatcgcctgactccgttaacgcccctcggccttgaattcgagatctgcctgggattgatagcccgtacccaggagttcgacatctacagcccaccgctggacgtcgatattaaggcaaacagcatgatgaataagatggaaaacgctgagttcctggcaactcgcgagcttttcatgtccatgcctggtggtcgcgattactcacgggcctgtaatgtcgcgacggttaaaacaacgccagagggtttgtggaaagatccggtgaaacatcgcgaatacctgaaccgtgtcatgactgaagccgaccacgctcacccggacgagcttattgttgatatcgcctgcggccgttcctcgatgcctatgccaatgcgtaaagttgaagaacctgacaatagtgatgcagataagatgaccggcgcgaatgatcaggccgatgatacgccggcgcgcgaacttgaaatcaggcctcaggtagaactggttgtttccggtaaaactccagtaatggatctgtcagaagcaagtgaattgcttaaccttttagaaatcgaacgggataattttatcaaatccctttcattcgacctttattttatggaggtaggtggtctctccatttcagatgacgaaattcatcacctcacattacaggcactgcataagtggattaaggttccggccagacgtgtgcgaatgcttgaagaagcactggcgaacatccgcacatcaaacgcaatgcctgaaaacccggagcaaggtgatctgcaggacaaaacaaatcagatattagccgctaaccgtggtgaatatattgaaggcatcagcgatcctaacgacggcaaatgggttacagaagatctaaccagaactaattctaccgcagagtccaccagtgatgtgcagatggaagagaatttcggtaatgaaaccgaagttgttaatgaaatttctgaaagcgaaacagcagctgagacaggtacaagtaatgctgacattggtagcgaaacaactaccgtaaatattgaatccggtcatcataatgatattgaagaattaccagcagataaggttcacgtcatggttgaccttgaaaccatggggaataaacaagacgcccctatcgtcgctatcggcgctgtcgtatttgatccggcaacaggctcaatcggggaaagtttctacaaagtcgtaagcctggaatcctcagtgaattggggcgccaaaatggatccatcaaccgtcatctggtggcttaagcagtcctctgaagcgcgctcggcaatcgtgaatgatgatgctatcccgctacatgatgccctactccagttcggcgaatttattttcgaaaatatccctggaggtcgtaaaaaagctcaggtctggggaaatggtgcatctttcgataattgtattctgcgttcttcatttgattacatcgctgaagaatacccatgggaatactggaatgatcgtgatgttcgaacaattgtagagctcggtaaagcaattggaatcgacccgaagaaaaccatcccatttgagggagaacggcacaacgcccttgccgatgctatacaccaggcccggtatgtttctgcaatctggcagcgtctcattgagggtaatagagtgctgcaaaaactgactcaaaactgattttttattttcagaattacgcccaccagccagttatcttttactggctggctatctgaggtgatagctatgtacgaactcacactgtcaccagtggaaattgctgaaattactggatacagacggtacacagaacagcagcgtcaacttcgatgtcacggcattccgtttactacggatagaagaaatcgcccaattgtcctgcgtagaagtctggcacctaatattactgaattgccaaaggttgacgagtatgttgcaacagaacccaactttgacgccatctatgggaagaccacgtaaagatccgaaggatatacaacttccgcctcgggtcacaaaaaataaatatagctatgtctggaaaccaaaaggtacaaagaaaagtattagtttggggaagatacgcgaaacaagtatgtcaaaactctgggccaattacgaaaaagcaaaagctgagcgccatgacgtaatgacatttgccaagctatggggaatgttcctcgacagcccgacattcactgagctggcgactcgtacccagagtgattatcgccaacaccagaagaagctactggcggtattcggcaagatgaaagcagacgacattaaaattgagcaggttcgtatttatatggataagcgcggcgtttccagtaagaaccaggcaaatcaggaagtatccagcatgtcgcgggtttttggttggggctttgaacggggatatgtgaaaggaaacccatgtaaaggcatacggaagtttacgctcatagacagagatgtatacattccagatgaggactatctagctatttatcagcatgcacgcacagagattcaagtagcaatggaaatctcatatttgtgcgcagcacgtgagggtgatgtgtttgatttaaaagtgtcagacctgatggagcttggaattttcattgagcagaataaaacagggaaaaagcagattaaggagtggtctgttcgccttcgcaaagcagtagaaaaggccagaatccatttagttagtcggtcagcagtgggttatgtgatcccaagtccgactggaggcaggctcaaccggaaaacgttcaacacctggtggaacgacgcaaagaaagaagcagagaaaacgctaggtagaaagattccaggaacatttcacgacatcaaggcaaaggccatttctgactttgaagggagcagcagagataagcagctgttttcaggacataaaactgaaagccaagtatctacttatgatcgaaagatcaaaattacacccacaattaaggcacccaatattgactgaaaaggatgtctcccaaagtgatgatatcaaatctatatcatcacccttgacatctgtgatatagatttgatatcatgaaaatgtcgataaaacgaccattaactgtgattttataaatgtaaatactgtatctaacatctaattgtaacctctattaactgtataaaatgtagacaagcaacgcgtatgcttgaaagggaaatactatgaaactcgtgcaaaaaaaatacataaaaaccatatttatcaatctattaacatttaaaaatagatgatattgatataagaggaatttaatgcagaaaaagacctaactgaggatttttatatgactgtacatgccgaaaaacaagcaagctttcttctaaggctgcgcactcaagatactcctaccggagtaagtagtgaaacgcttgatgctttaatgcaaaaaaccggcctgagcaagacagaagttacacatttggctctgcgtagtttagctgatgcatatctgccgcattacgaaagagacccagaagctttaacccaagctcaaatccagaaaatccgcgaggtttcaccatcacgggatgtgccggaggagagtttcactatgacattgttctaaggatcgaaaatggccaacacacaaaagcataacccactaccaacaccaggcgatattgtttggtgccgcttccctacccatctcaagattggggaaccggggccctacagccgacctgctttggtttatgcggtatcgcctgaacaccatacggtgaaagttgtatatggaaccagccagaagacggacaaaatttataaatctgaattcgtggttaaaaaaacagatgctaatttctcagatagcggcttagcatttgataccaagtttgatatgaaccatatcgttcagattccatatgattatgaatggttcgagatggcacccgtgaaagatggccaaaaacccaccacaaatcctaaaatgggcgtgctacatccaagctacatccctaaagtaaaaacagcaatgaaaaacgcccctctcttagcggcctgaacaggctaactctataaaaaataccctgaaatgatctataaggcctcgtaatcacgaggcttaaatgttgctgaatataccaagtgaatataccaacactataccaagagcccaaagcaacaaggggttacctttcggtaaccccttgttttatttggcggaagcgtagagattcgaactctagaaccctttcgggtcgccggttttcaagaccggtgccttcaaccgctcggccacgcttccggtatggggcgcactataaacacctctgccgatgctgtaaagcatcattttgttcaactgccttaaaaacaaacaaatctgtgttattcgtctgaatttcaggcagtttgcacagaaattcggcgttgagagcgccctttgactcaatgttttatgatgtacatatctttggtgtagtagtaacccagcttatccggctcgaagccgccgacccacggcttcactaaatgggtacgcacatagtgataaaccggaatcgcgggcacatcctcagccaacagatcctccgcctgctgatagaatttgcctcgcgcggtggtatccgccgccttcgccgcatcatgcagcgccttatcataggccgggttactgtactggctggtgttttcgctgtcgccggtgcggaagttattcaggaatgacgccgcatcgtcataatcggcgatccaggcataacgtacggcatcaaaattatgcgtatgcatggtatccagcatggtcttccactcctggttctgcagcttcgcctctacgccgagatttttcttccacatcgaactggcggcgatagcaatgcgctggtgcgtctccgaggtgttatacagcagattaaagaccagcggatggctttcattaaagcccgcctcgttaagcagtttttttgcctcggcaatgcgtttgtcgcgcggccagctggcgtaatccggttgtttcagcgtgacgccgccgatatcgggctggctaatcagccatgccggacgttgtccctgccccatcaccttatcggcgatgatatctttatccagccccatgttgagcgcccggcgcactcgggggtcattaaagggcggtttagtggtattcagttcgtaatagtaggtcgccagctgtggcgcaacgttcagctgcgagcccatcgttttcttgagtaacgcaaactggttcaccggcaccgtataaacaatatctatctcaccggctttataacgattcacatccgccgcttcggaagtaatcggcagataggtcactttattgattaccgtatgttcattatcccagtacttaggattgcgttgcgccacgatgcgctcgttgacgacccacttcgacagcgtgtaagggccgctggtgacaatatgttccggtttagtccatttatccccaaaacgctccaccagcaccttatcaataggcaccagcgacgggtgagcaagcatcgcgaggaaggcggcgttaggctggtttaacgtgacctgcagcgtggtatcgtccagcgcttttacgccgagagtttccggcggctgtttcccctccgagatatcgcgggcgttaacaatatgcatattgcccggatagctggcgtacggcgaagcggtggtcggtgtgaccagccgctgccagctccagacgatatcctgcgcggtaatcgctgaaccatcggaccaagtgatccccggacgcagatggaaagtccagatgaggttatctttattctcccacttcagcgccagccgcggctgaatctcgccctgcggcgaaacgcttaccagcccttcgaacagatcgctaatgatattaaactcgacgtcgctttcgaccttatgcgggtcgagcgaagcgggttcattaccgttgttcctgacaagctcctgttttgctgcaagttcggtaccctgcgggacctgggcggccattgccgtggcggcgctgccgagtaaacccaaaaccagtaatgcgtgtgtgatgtggttatattgttgtcgtttcatttcccttgcctttatgcttcgttgataccccttccacacttagtcgctgactggcaataaggcaatatttttcagtgacctataagattcagatctgctttccgccgctgaacgcataaacatactgcattaatctgttttaccagaataaaacgctgccccaccgataccgggatctgagtaaagatgggtaaaagcattatggctttcggctcgcttttcttatgcttcataactaattacatctgtcataagagagtgactcatggatcgtataattacctcatcgcgtgaccgttcatcgctgctcagcacgcacaaagttctgcgtaacacctattttctgctcagcctgacgctggcgttttcggcgatcaccgccaccgccagtaccatgctgatgctgccgtctccgggccttatcctcaccctggtgggtatgtatggtctgatgttcctgacctacaaactggctaataagccaagcggtattctggcggccttcgcctttaccggcttcctcggctacattctggggccaatgctgaacgcttacctgtccgcaggcatgggcgatttgatcggcctggcgttgggcggcaccgccctggtcttcttctgctgctcggcttacgtgttgacgacgcgcaaagacatgtccttcctcggcggcatgctgatggcgggcgtggtggtcgttctgattggtatggtggcgaacatcttcctgcagctgccggctctacatctggccatcagcgcggtgttcatccttatctcttccggcgcgattttgtttgaaaccagcaacatcatccgcggcggcgagaccaactacattcgcgccaccgttagcctgtatgtttcgctgtacaacatctttgtcagcctgctcagcatcctcggcttcgccagcagagactaaccttctctcctgcaacaccaggcctcgcttatgcggggccttattttttgctacactgcgcgcagtttccgcattatgtgaaaaatcatgtttatctttgaaggcagtgaaatagagaccgatagcgaaggctatctgaaagagacgactcagtggagtgaagcgatggcggaggttatcgccgctcaggaagggatcagcctgtccgtcgaacactgggaagtagtgcgcttcgtgcgcgatttttatctggagttcaacacttcgccagccatccgtatgctggtcaaagccatggcgaataaattcggtgaagagaaaggcaacagccgctatctgtaccggttattccccaaagggccggccaagcaggcgacgaaaatcgccggcctgccgaagcctgtaaagtgcatttaatagagaatagcgaatttttgccactctctggtgggttgatggggctcagttaacaccctgtcgacccttgcgctacgcggcccgccggccttaagccaggcaatcagtttttccacctgctccgcttccccgcaggccagcacttctacgctgccatcatccagatttcgcgcataaccggtcagccccagctgcagcgcttcacgctgcgttgaatagcggaatcccacgccctggacgactccgtgaacccacgccatcgtgcataccttcgccattattaccccctcaactgcgctatcctgatgcagagaatagcaaattcccaccagcatactcacttttgcctgacgctaaaacatccgcccggcggcggcaggaatggtgcttacccctgccagttatgctaatctacgcgccatttttcggtgccgacactccgtcgcttaaaggtagctccatgacagattccattatcccccgcttagtattagccaaaggacgcgagaaatccctgctgcgtcgccatccatggattttctccggcgccgtcgcccggatggaaggtaaagctcgctccggcgagacgatcgatatcgttgattcgcaggggaaatggcttgctcgcggcgcctattcgccctcctcgcagatccgcgcccgcgtctggagtttcgatcgtcatgaagctatcgataatgcttttttcgagcgtcgcctgcagcaggcgcaaacctggcgtcaatggctggccgaacgcgatggtcttgacagctatcgtttaatcgccggggaatccgacggcctgccaggcgtgacaatcgatcgctttggcgatttcttcgtcctgcagctgttgagcgccggcgcggaatatcagcgtgcggccatcgtcagcgctctgcagaccctgttcccgcaatgctcgatctacgatcgcagcgatgtggcggtacgtaaaaaagaaggattggacctggcgcaaggcccggtggtaggcgaactgccgccagcgctactgcccattaccgaacacggtatgcagctgctggtagatattcagggcggccataaaaccggctactatctcgatcagcgcgatagccgtctggcgacccgccgctacgtcgccgataagcgcgtcctcaactgcttctcttataccggcggattcgcggtttctgcgctgatgggcggctgccgccaggtcaccagcgttgatacctcacaagaggcgctggatgtcgccagacagaacgttgagctcaataagctggatctgtcgaaagccgaattcgtacgcgacgacgtgttcaaactgctgcgtaaatatcgcgatcagggggaaaaattcgacgtcatcgtcatggatccgccgaaattcgtcgaaaacaaaagccaactgatgggcgcctgccgcggttataaagacattaatatgctggcgatccagctgttgaacccaggcggcgtactgctgactttctcctgttccggcctgatgaccaccgatttatttcagaaaatcatcgccgacgccgcaatagatgccgggcgtgatgtacaatttatagagcagttccgtcaggctgccgatcacccggtgattgcaacctacccggaaggactgtatctgaaagggtttgcctgtcgcgtcatgtaacttgaaaagcggaacatcgcccacacattattctcatgactcaagaacatttgaagatgatggatacagtgggcgccagcgtttcccgggaggtgactatgattgccagcaaattcggtatcggccaacaggttcgccatacgctactcggctaccttggcgtaatcgttgatatcgatccagagtattcgcttgacgagcccgccgcggatgaaatcggcgccaacgatgaactgcgcgcggccccctggtatcatgttgtgatggaagatgaggacggccagccggtccacacctacctcgcggaagcgcagctcagcagtgaagccagcgatgaacatcccgaacagccgtcgatggacgaactggcgcagactatccgtaagcagttgcaggcgccgcgtctgcgtaactaagccctccgcgccgccccgatgggcggcgtgtttccacgatcgctcttaatgctcaacctctgcgtcagctaaagcctgacaaatcgcgccgttaaactgcggggcctgttgttgagcttctgaccaacgagtattagcgacattcagctgtcttgactgcgcagcgctattgcgggacagctgattaaagaaaggctgtagcattcctcccccggcaacgtcctgcgcaatcaacaccgtagaaccatcgctgtagcgaaaacgctgagcagcggcaggcagcgcgacgctggcaaatcgcgccgccgcgacgcttgcccagtagttggccgcagagtagccgcgcgagaagttactttcacaggccggtaacacggccagacgacgggtatttttctctggcgctttaaaactattttccatccagcgcgccattccttccagataccatcgttgtttaaacaccgcgtaaccatattgataaagatggaaaaactcatgagccggtgtgacgttacgggctggatctagcgcagcattcagcacaaacttcaggccgcaaggtatctgcctgccatcgcccatcgtttctgaagcgacgcggtcgaaggcaaggccgttaccttttggcaaagtcagcacataaatgttgatttgccgcgcctgtgcgtaaattttctgctgtagcggaaagcgtaatcccaataccgtggagtagagatatttagcggcctgtagctgaacggcaatatccttaatgctgtcgggaacaccgctacccgaactgtcgtactgaaatttaagggcatcaggcccctgcaggctataaaaaatgtggaactcatcttcgacatattctttttcaagaacatgcttaagtagtatcgaacctttaacacagcgcgatacctgcaccatttcttccgcggaggctgaagggagacaagacatcgccaaccaacacgctgctattgatgtcgcccatgattttactggttgcatagcgccgcctcccccgacatgctccgccccgacatcatatgctcgccggggcggcagtcgtcttacactacccgttctttgagagaaaccacgttcggcccctgttggccctcagcgcttatccgctgttcattctgctgcaaccactgctcccagcgttgggcaatcgcattggcgcaataacgtcgcgcgttacgcagggcggcagcctgcatctctttttgtagcgccttgtcagaaataacctgtaccaacgccaccgccagcgcatcttcatcaccgtatggcaccaggatcccggcctgtcgctcctgcagaatatcgcgcgggccatattttatcgcaaagctgatgagcggcgtgccgtacgccatcgcctcaacggctgacaaggattgcccttcctgatttgagcacaataccgtgcagcaggcggatttatgtactgtggcaatatctgaggtaaagccattaatggagatgatgtcctccattttccacgcttttatctgatcgctgagagtacggcgtaacggcccaacgccataggtatgcagtcgcgcaccaggaagctgcgccgctaccttgcgaaaggcgttaaacaacatcatgtgctgcttctcttccgagtaacgcgccaggtagataacggtttcagagggatccttttgcgggtttgccggaattttgctgtcatccatatgattagggatgacggtcagacgttcgccgggaaatccttcatgctgtaagtcctgccactgctcatcggtgagaacgattaagcggtcaaccagttccggttgctcaattaagtggcggtaggaggctttcactacgccattaagcagctgatgatgggagtggataatcgcgctcagcgtgcagtctatccgctgtgccggacgagaacagacaaacgctttccaggctttatttttatcgacgataaaatgccagcggcgctcgtcgggcagcatcatctccagcatccacgagaagaacgcctcctgctggttgaaggatttaacgtcgccgtcaggcaaggcaacatcgatacgggcaatttgcaaattcgcttttctttcgtcgaaatatttgcgcagcagaacattgccggcgtcatcgacataatcctccaccagctgtccctgcgggcgtagctgatagttatttttgccgaccgaggcctgggccttcggcgcgatagcctgtcggagctcaacctcacctttaagcgcaggcagcgggataattttccccgctgcgaagctcgtcactaaagcctcgtagaggttataaaccggcacctcttccggcaacgcgccgcgcgcctttaacgccttgaccgcgacatgcagttccggatcccacattgcggtgataagccagggcacagtctgcaggtgctcgacgaacagcttcgcacgccgggtggcggcgacttcaataccgttgccaacatcacgcaggttctctaacaaaaataccgttgtcccccggcgttcgggaggcgcaaccgcaggaattgactggcgcatagtcgccgcctgataatatttttgataggcaatatagccagacagatagtgctcaacgtcatcaatacgcacgcggtagctgtggtggcgaataaagaagctgttgacgatacgcgccgggtttttaaagaacatcgccagttccggccagaagaaaccatccagcaggtagcgcgcacgacactccaacgcctgatagaacttttctttatcaaacccttcaagtaaatgacgttgcgccggcgaagcgtcaaggcgcgcaatcatctctgctgccgccatcatcagctccagcagcgtcggataggttgtcacgcgctgcagtacgaaatccagatgtccacgcacgttatccagcccaaagcgaaaataacgttcttccggacgaaaacgcgtcaattcgttaacacagtaactcagccagtggtcgtgatgctgccagtgctgttgccgaatgaagtattcgaacgctttttcaaccatcgccagccactgcggcatttgcgtcaggctatacaaacgcatcaacgcgaacgccgcctcgccatcgtagtagataatacgatgcttagccttcaacgagaggtcgtgactattgagaacatggacaaactcgccgctctgcgcatcctgcataaatgcaatgccggcggccagttgcgccattaattccaggtgctgctggtcgcctgtcgtttccgtgtatttgaccagcgccagaatactcaccgcattgccgccgagtttaatttcattatcgacatcacacaaaaatgccgcctgttgcccatcgtcaagggtacgcacagaaataagattggtaaccaggtaaccaatcgctcgatcgatcgcctggcgcaggtgcggttgcctggttgcttcccatgcttcaattaacgaataggtcgaactggcatgacgcaaggcgttataggatcgtacaggacgatcgaaacagggaaaccaaccgtagtaataaagtccatcttttttcacctgacgagctaagtaatcgctaccttttttgatcacttccgccagccagtttttttgccattcttcgccgataacgcggtagcctgaactgcggccgctgtgctcaatcagcctggcgccgctgcggtcgcagaataccgcgcgggttttgaaacgccaaagtatctgctgtggtgcatccggccagctcaaactttgtttaaagcgtcgttggccatagttttcaagattgatgccatttggcgccgcgacaccgttatctccgtcatacaataaggcattcgccgcaatttcctgttcgaggatcgcctgagtaaattgcgcatcgaaagaaaggccaaagcggaaataattgcgtttggtgatgctgagtttcttctgtagattttcccagctgagtttttcaacgctatcgacaatatcaatacgcaaccactgtggttcgttgtcttgttttttgcgccactcctgcagggctctggcgccagcaagccaggcttgatcaaaactggccgccgctgcgacctggacatgcgcccgctccttaccatcactcacgctaaaaaagataacccacccgggataatcagcaggcagcgcggtcgtttttaatggtctgctctgaaagcaggcctgttgtaataaatcgcttaatgccatctcaaatctccatacgttgaaaatttcaccaaacatgaagccaacttgtgggtattacctttctctcagcgcctcttttgctcgattaaatggtttcaccagataatccattaccgtcttttcgccggttttaatatcaacagtggcgatcattcccggaccgattaaaaaacgcttaccgtgtttattttccagatagttatgatcggtacggataaacacccgatagtaataaagatcgggttttgcctcgtcctgaatagtatcgggagaaatggtctcaacgaccccattaagcgcgccgtagatggcataatcataggcggtgattttcaccagcgccttctgatcgggatgaataaaagcgatatcgcggggcgaaatacgcgcttcaattaataagcggccatcgatcggcacgatgtccatcagttcgccgttcggggcaataacgccgccaatggtgttgaccttgatatttttgacgatcccctgcacaggcgagcgaacggtcagccgggcgacggaatccgcccgccctttaatgacttcggcaagactggctacgtcggcattggctttcgataactgttcgcgggcatcgacgtagtagcgggtgttgagatcgattttctttaactcaatatcggcagcctgttggcgcaaacgcagcacttccacattactggcagcgccggttttagccagcctttcgttgatagccaactcgcttttcaccaacgacagcgactgctcaagctggcgcatcgatttggttagctggtcccgtcggctatgatagaggcgggtttcttccgccagtaaccccggccaggccttaagagaaggaggaaaaatcagcggttggttattaacttcggcggtaaggcgaatgcttgctgccagtgaagcgcgatatttcgcctggctctcgccgacgttcgattcgctacgggtagggtcaagccgcgcgacgacctgcccggccgccaccctgctcccctcgcggacgttgagctcggttaagatcccgccatcaagggtttgtagcacctgctcacgagagcttgggatcaccttacctgtcccggtcgaaacctcgtccagggtcgcaaaccacgcccatacgccggtcactaccattagcagcgccagcaggagaattaagcggcgcgatttgaccagttcagcctcatcccgttcattatcgaccatgtcagaaaccggatcggcatcctgcgccagtgggagaatcgcgtcggacttattcatatattcaccacctggccacgcgctttttcttgttcaaagaccgtcgctttaggtttatccaacgccagttgcccatcctggataaccaaaatacgatcgacaatgctcagtaccgccgctttatgggtagcaataatcaatgtacgttcgcccacccaatgcgccagttgctcgacaaacgctttttcggtgcgttcatcaaagaatgaagtcggctcatccagcaaaataatattggggtcgcgcagcagagagcgcgccagcagcaatgattgccgttgcccgccggaaaggccaaggcccccttccatcaccagatgctcaagccccatgggcagtttactgacgaactccatcgccccgcacagttccagtaccttcaccagttcgtcatcactggccattggccttcccagcgttaaattttcccgtagcgttccgtggaacagacgagcttcctgggtcagcaaagtcgcattgcggcgaatatccgccagatcgatttgcggcagggcaagatcgtcgagccgcagctcaccggatgccagctcaacgttacccatcatcgcctgcaatagcgtcgatttgccggcgccgatgcgtccgaggatagcgattttctccccggccttaatcgataactgcttaatacgcagcggaatggggccgttgtccttgccgtagcgaaactcagcgttgcgaaactcatagttgccgtgcagcacagcgcggtggatgcgcggctcatcctgcccgccttctaccggcagcgccatcagattatccagactggctttcgccaccttcacctgctgccagcgcgccaatacgccgcagagcgcggtcattggcgccaccatcctgcttgacaacattgacgccgccaccatcgcgccggttgtaatgtcgccattaatcaccagcggcgcgccgaccaccaccaccgtggcgtacagcagattctggatagacatcccccagctcaccaggccgtgggtgactttgcgggtttttacccccgattctgcggtgatagccacatagctattccactgctgcagaaagcggctttccgcctgcatcattttgatatccggtaggccctgaatgctttccaccagaatggcgtttcgtagcgtgctttcgtgttgattcttgttagccagttcggccagtttcttttgcaataaaaatcccggaagcagcatcaggatcgtcgcgaccggcgcgatccaactcaaccaaggcgaaacaatgaacagtaccagttggaaaaggatgaaaaacggcagatcggcaataaccgtcatcatggttgacgtcatcatttcccgtacctgctcgagctcgcgtatctgtgaaataaaactgccagtagaacgcggaaccgctgagttttttagccgcagcgcgtgaccaaatacacgatcggaaatacgaatatctccgcgtttgccaagtaggtcagtaacgtgtccacgtgtaattttgagaataaagttgaatactgcagcgattaatacgccgctgaataaaacgtataaggtgggataagactgcgccgggatcacccggtcgtacacctgcatcgaaaatagaatgccggccagagccagtacattaattgccagcgatgccagcatgacatgcatatacgggcggatatctttgagaacgattttgcgcagccagtccggctgaaagcgcgcaagataactttcagttcggatatctttttcgggcgaagctggacgaaatgcaacggtaagctcaatctcagccaataatgcgtccagcggccactggctgagtaaggtgagctctttgacaaaacggatgccaactaaattattaagatcaaagctttcgataataccaatctgcccatctttaagctgaacgactagcggcaagcgccacgccgacatacgccggtcgttgccgttgagaaattgacaatgcaaaccggcgtgccgacagagatgtttaagcgcatcaggcagtgttttctgcgtcgcccactccgccgccgcatgcagcgtccccggcgaatagctctgccgataatggctggcgacaaaagccatcgcgttagcccaatccagaagatggggaatatcgctgtgatgaggttgttcgctcatgggcggatctccacaccctggatgctttgattatccagagcaaaaacggagcgcatctttccagtactgaacagacagtccagctccagattacgcagttgtgcttcagttaacacctggctgaattgcgcctgatagatttcctgatcgacgttaagcagatccagtagcggacgcgtacccaactgcagatattgatcctgatagagcgcgcgagtttgctcgccaagttgctgctggcggcgctggatactgatggattgtttaagattcagcgcctcatcgcgcgaggcgcttaatttctgactggcatcgagttgggcgtttctaatcccggcgttagccgcagataaaatttgctgcgccgcttcgcgggaggccgttaatgcccccccctggtagattggcatttccactttgacccacgccgaatattgcgttttatttaacacggcgctgttggcgtaattatcattcagataatgcgtcacctggggttccagagagatggtcggtagcatttgcgctgtcgcgttatcgagctgcgcctgcgcctgcgtggcttgcgctaaagcggccagcacagcgggtacggcacgataatcaattttacttacggcacaggccgcatccatatcctgcggcacgccgtcagtcacggaggtaatactgccaagcccaagataggtggccagagtcgctttccagcgttcgagcgccgcctgatattggataagcgtcgcctgcgctccctcaacgcgagtgtcagtctgcacaacatcagagagcgaagttgccccggcatcgttacgctggcggatcagatcgccaatttgttttagcgaatcaacttgtgcctgagcgattttcaccagcttctggtagccctgcatctgcaccaccgcgccagcagtatcatgggccacctggtcgatattaagcatcaccatcgcctgctgctgggcaacggcggcatctgccgctctgaccgagcttgagactttgccgaagtcgtagagcatttgtgaaacagaaacaactaatgagggtgaatagccggaatcggagtatgaattactataaccattattcatccccgcgttcacctggggataatatttggctttagctacatccacgcgctgcacctgttcctgaagtttactcacctgctgagtaatcgccgggtgccagttgaccgctgattttaccgcggtggcaatatctaacgggccggttaaatgactctgcggattgatgagatcctcagaatatccggcgacctgttggctatcgtttaatctctgagtactaatgttagtcggcggaaatgaaagctcttccgcatcagccgttaatattacgcttaacgacagcaaaattgtgctgaacctgtaaacgctgacaatccctttttgttgaaatagacgcataaaattacccttcagaaagcatactgaaaatatggatatactcttttcgcatcattctttttatttaacgattgcccatcgtttccggggttgtttttcgtcgtttcacctccagcgtataaagccataatggcggcgcctccctgcgccacccgtgatatggcctgattttagtgcgagttattggtatcaatcagctcgtcgagcgaattgatatggaccccctgcagcgtgattaacgtcgctggctggtgcgtcgttccacccgaaccatcgcggtcgatagacaccaccgtattaccgccgacatagctcagcgtaatatagttacccagcgtatcactggatccattccagccgaccagcagcgcagagacatcgatatggtctccctgggcgaccgagaaatcgttccaggtatcgctgccgttgccccccgtgttgtcatccgccaacaggttatagaccaccgtatcggcgccaactcccatgctataggtgtcatcgtaagccgtactgtgaatgctatcgtcattgacgctgccggcaatctgcggatggagatcgatggtcaaattcgccgtcgaactaccgccatcactactaataagcgtgtaagtaaacgtctccttagccgtaatggcatcagtattgataccgctattcagctgataggtataacctccctgcccatcaatggtcagcgttccatattcaccatacagcaccgctttcccgttagtcgcgctggttcctgtgtcgttggtcaaggctccatcagtatggaatgtccaatgcgtcacgacacccagattgttttcccccgttatcgtgaacccgctatgcaatgatccaagcgtatcctgaaccccgtctgcgccagaaccgtcgaggatattgccggccacagattgcgcggccgtcagatgcgcatcggtatgaatctcggttcccgtcacgctcgccgccaggttgtatgtcattgccggtccagcctgcatcgtatgactaatactcagagtataatcacctgcggcaagttgtaccggagtagttccattaaccaggttaagcgtcacagtgtccgtatccgttgtcgggcttatgatggggacaccatccagagccatactcaaaggcccgctccagaccgtcacatcagtcattaccccgtcaaccatcacatgatgaaccaatgtgactgtccctgagagatcgccgttcaatacagtcaagccactagtcctggtgccactcagatttagggtgatggaagcgttatccacttcccggccttcagcgacggtaaagttctggcttgtaactttagtcgtcgatgtcgtattagccgctactgctgcatttgttaccgcaagattactgacgctttgcgtccaggtaaccgactgcattgccgttgccaccgacagggaggcgatatcatcaaccgctatcgctggcgttgactcaatgttcatcgtcagcgttgtcgacgatgtatgacccagcgtatccgttatcgtataggtgaagacatcactctgacccacaccggttgttccattagcatgataactatagctaccatcagacttgatagtcagagtaccgtaggtgccgttaatcgtgacgccgccggcagtgacggtctcgacctgcgatccaaactggatgctgcttacggtaattccattacctgtatcgccaacatcgccatcgctatcggtgtgcagaacattccccgtcacgtatttagtcgaatcagtcacctccatactaatgctggtgcccaaattcagattcagtatcgaaccaatcaatcctccagtcgtcggcgacgaaataacgaccatatagttaccggcaccaattttttcgaactcaccgccacccgcgtactgcaggcttaatccaaggagcccctgcggtgttgccgaaattccatccttaatgacgccgacaatctggttggtatcggtattcaccaggataagatccagagtgaccgcgccaagcgccacgcttaaggttgttgaccccgaaacggccagggtgacatcctgttcagtcccgtcggctacggtaaatttaaagccatttgtcggcagcgcgacattcaccgtattgagtaaggaaagtccagccagttgaacgacattacctccctgtatatcaatattgtcatcgacattcccgacgtagtaagcctgggtatccggattggcctgggccgattcaacctcctggccaatattgatggtcagtgtggtggttgattgcacgccattgctgtccgtaatggtgtatgtgaatacatccgcattacctgccgaacccgccttaccagacgcctgataggtatagctaccgtcagcattaatcgtcagtacgccataggcccccgttactgatattgtgccgccgttgactgagtgaggttcacccgccgcagatgtcgcggtgacagtggtaactgacagacccgtaccgctatcagccatgtcgccattttcagaaccctccagcacgttgccggtgacggtgcttccgctataacccaacgaatcggttaccgttgcctcgacaaaggtggctacacccgctcccgcgagcgtattaatcaagctaaccaataccccatcagaattcggtgaggaaatcgccaacgcatagtttcctgccggtaagttctcgaaggatgccgtaccgctataaaccagcccgccaagtaatgtcgcgctgatattcacacttccagggtcaattgcgaccactcgtccagttgcgacatcaatcaccgagaggtcggccgtcaacgtatttccagcccccaacagattgactatcgaagttagcagtccgccggttgaaagcagtgacacgccgctgacatcaacagtcatattttctgtggtgttgttatccacgttgaagcggaaactactgccagacagcagtgacacattaatcgtgcttaacagcgagacgccaaccaactgcgacagattaccttcggtaccattaaggttgccgtaatgctgcacaacctcagaactgttggtatcaggtattgcctcaacagaatccgagtcgctgtcggagtccgagtcgctgtcagaatccgaatcgctatccgagtcagagtcactgtcagaatccgaatcgctatccgagtcagaatcactgtcagagtcggaatcgctgtccgaatcggaatcgctgtccgaatccgagtcgctgtcagaatccgagtcgctgtccgagtccgagtcgctgtccgagtccgagtcgctgtcggaatcggaatcgctgtcggaatccgagtcgctgtcggagtcggaatcactgtcagaatccgaatcgctgtcagaatccgagtcactgtcagaatccgagtcgctgtcggaatccgaatcgctgtcagagtccgagtcactgtcggagtccgaatcgctgtcagaatccgagtcgctgtcagaatccgagtcactgtcagagtcggagtcagagtcagaatcgctatcggagtccgaatcgctgtcagaatccgagtcactgtcagagtccgagtcgctgtcggaatccgagtcgctgtcagaatccgagtcgctgtcggaatccgagtcgctgtcagagtcggaatcgctatcggagtccgaatcgctgtccgaatccgagtcgctgtcagagtcagaatcactgtcagagtcagaatcactgtcagagtcggaatcgctgtcagagtccgagtcactgtcagaatccgagtcgctgtcggagtccgagtcgctgtcagagtcggagtcactgtcggagtccgagtcggagtcggagtcagaatcgctatcggagtccgaatcactgtcggagtccgagtcgctgtcgctatccgaatcgctgtcagagtccgaatcactgtcagaatcggagtcgctgtcagaatcggagtcgctgtcagaatccgagtcactgtcagagtccgagtcgctgtcggaatccgaatcgctgtcagagtccgagtcactgtcggagtccgaatcgctgtcagaatccgagtcgctgtcagaatccgagtcactgtccgaatctgcatcagcatcagattctccgatatcacttcctgccacgatattaattgtcaacgtggccgtcgcagtatgaccattcgcatccacaatcgtgtaggtaaagacatccgcctgcccaacagcgtctgcatcccccgttgctttgtaggtatagctgccgtcggcatggatcgtaagttgcccgtagagaccattgattacgatacctgctgccgtgacatcaagcggtgtagtctgcacgctggaggcaattttgcttaccgtaataccctcaccggtatccgctacatcgccgcctgcatctgcggtcagaacattgccggcaatagcagtcgaggtatattccgtagaatctgtgatcgttgcttgcgctaccgacaacagatttgccgacgccagttcatcaaccactgcggccaggccgccggatgcctgcggtgaagaaatcaccaccgcataattccctgccggcaagtcgctgaaggtcgcgctaccggagtaaaccaggttcagtaaagccagagacggtgtcaggctcacggcatctgggataatctgcaccacctccccggtgtcggtattcacaatcgacagatcggcggtaatagatgatgcgcctcccaccaattgccccagcagcgccagtatagactgcagactcagcaatgttgaaccggtgacagcaatcgtcacatcttcggtcgttccctcactgaccgagaattttgtcgagtttgctgccagcagcgaaacatcaaccgtattgagtaaggtgacgcccaacagctggctcgctgtgccggtcacgttattcagattgccttctacggtatcgatagctgccgtatgcgtatcatcatttgcctgcggttcggaatctgaatcgctatcggagtccgagtcgctgtccgaatccgagtcactgtccgaatcggagtcactgtcggagtcggagtcgctgtccgaatccgagtcgctgtcagagtccgaatcggagtcgctgtcggaatcggaatcactgtcggagtccgagtcgctgtcggagtcggaatcgctgtcggagtccgaatcgctgtcagagtcggagtcactgtcggagtcggagtcactgtcggagtcggagtcactgtcggagtcggaatcgctgtcggaatccgaatcgctgtcggaatcggaatcgctgtcggagtccgaatcgctgtcagagtcggaatcgctgtcagaatcggagtcgctgtcggagtccgaatcgctgtcagaatcggagtcgctgtcggaatcggaatcactgtcggagtccgaatcgctgtccgaatccgaatcgctgtcagagtctgaatcactgtcagagtccgagtcgctgtccgaatcggagtcactgtcggaatccgagtcgctgtcagagtccgagtcgctgtcagagtccgagtcgctgtcagagtccgagtcgctgtcactatccgaatcactgtcagagtcggaatcgctgtcggaatccgagtcgctgtcagagtcggagtcactgtcggagtccgaatcgctgtcagagtcagaatcactgtcagagtccgagtcgctgtcagagtcggaatcactgtcagagtcggagtcggagtcgctgtccgaatccgagtcgctgtcagagtcggagtcactgtcagaatcggaatcgctgtcggagtccgcatcagcatcactttcgtggccgccaagatcggagtcactgtcagagtccgagtcactgtcggcatcagagtcagtatcatcgttcgaagaatgcgaggagtgatctttatcggaagatcccgcaatcatcgcccctacaccaagcaaagccgcacccgccattacccatggcgcgatactgccgccagagcttcctgcggctagaagtcctgaaatatcactgatgagagaataatgtgcatcgctggttccagccccgtcaagccaccacaatgcgccagtgtcatcatcctgtagcactaaatcactatgatgcccattagcatcattaacaaaaaagttttttagcgtaagggtgctaccgtcatttattttcagaacaagatcattaccttgcctggcgtaggaactaatatcctctcgcttaatatgtaataccaccaccgactgcgtgtttaagttaacttgattgccatcaacggtgtatttaacacctgtatcttttgctgtcacatttatatttttcatcaggaagcacccttgagatgaagacgcagtcagaggtttgggataattcttaattatgcatcttattagatataccagaacctacggcctcgcaaggatgttacaaaataaaaatgaaacacactgaaacaaccgcaaccaaatgattaaattaaaaaataactaaaaagacacattttgacatgacattatttttcatgccagctttgtaactcataaccgaaagctatggtaataaaaattatacttcctggttttctcatttctttttgtatcgaattagcgtcatatcaacaaaatctgtgacggatttcatctattttaatcataaaaagataaattatttttaattattaaaatttataaacaacgcaaaataaaaaccatagtttttccgagccaattaaaaaaacgattttcggagtgttttttaatattttttcattctattactgcccaccaaaaataaataaacatcagttacattgtgggtaattaacatttattagattacaactttattgacgaaacgtttcgctcatctaaataagtaataacgctcttatctgcaaattaagtccataaaaaaccccgcaaatgcggggttttattttacttcgctaaccctagtcggggaatttcaatagccggacaacggtccataaccacatttaatcccgcttcacgcgccatcaccgccgcctgctcgttaatcacgccgagctgcatccacaacgtcttcgccccgatggccaccgcttcttgcgccacaccccacgccgcttcagagttgcggaacacatcaaccatatcgattttttccggtacttccgccagggtggcatagccttgttgaccaagtagggttttacctgcgacctttggtgaaaccggaatgacgtggtagccctgttccagcagatatttcattacccgatagctcgggcgatcgggtttgtcgctggcgcctaccagcgcaatcgtccgggtggtggtcagaatgctagcaatatcgttctctttcatcataatcctcctgcgctttagccctagtgtaagctaatccatgtaaaccagccatcaagcctaactcacagatacggcaaaatttttctttccgacgcttgcagcatcagtcacttccagtactctgtctgcaggttaatataagtggaacccaattatggaactgacaacacgtaccttacccgcacgcaaacatatcgcgctggtagcacacgatcactgcaaagatctgctgatgaaatgggtcgaacgtcaccaggcgctactggctcagcaccagctctatgcaaccgggaccaccggcaacctggtctcacgcgccaccgggctggaagtgaaagcaatgttgagcggaccgatgggcggcgaccagcaggtgggcgcgctgatttcggaagggaaaattgatgtactgatcttcttctgggatccgctcaatgcggtacctcacgatcctgacgtcaaagcgctcctgcgtctggcgacggtgtggaatatcccggtagccacgaatgccgccaccgctgactttattatccagtcgccggactttaatcaaccgattgaaattttaatccctgattaccaacgctaccttgccgagcgcctgaagtaatccccacggcggcctgatggccgccgacgatcagggctttcgcgccaccggcacgcccagttcctgcagtatctcaacaaatgacgaaggccgttctttattgaacagcagccagacccgcaggcgagcgcgggttatcgccacatacagtagccgacgctcttcagcatccgggaaatcttccggctgtggcaacaacgcttgttccattaccgactctcttgccggcgccgggaaggcgtcatccccctcctgcaggcccaacacaataacaaagtcagcctgctggcctttgctggcatgaattgtcataaaatctagctgcagatgcggccagcgggtcgcggctttttccagcgcgccgggtttcagatggtgatagcgtgccagcagcaaaattcgctgttcgggtttaacgtagccgctcaacttgtcgagcagatcgtcgagtttatcgtcgggcagcagggtcaccgctttcttatcgccagccgtgaggctattcagcggtttagccagctgatgcgggttttgctgaataaaaccattagcaatctcgccgatacgaccgttaaatcgataggtggtatccagcgcgcagcaatctccttcgccaaagtagtggttaaacgccgtggttaaagagagctgcgcgccgctgaagcgataaatcgcctgccagtcgtcacccaccgcaaataacgaggtctgtttattttgccggcgcaacgccgccagcaattcagcacgctgtggagagatatcctgaaactcatcaaccagaatatgtttccaggggctcacaaaacggcctttatccagtatgttgaccgcctggtgtataagcccggagaaatcaacggcattttcctctttcaacgctgctttccaggctttcagcagcggggccatcagtttcacacgcttattaaaaagatcgcgaacttcttcaggggcgcaggcgatcatctccgcctgcgagccgccgtgcatgcgcattaaactaacccagcggtcaaggcggccggccaggcggcgcagcagcacgcgatcctgccagaaatcaccttcgtcaatctgccactccatctcatccaccagccactgacgccagcctttggcctgcgcttttttctcctgacactgctgctgccaggccttcaacaatagcttttgccgggcggctgtatcgttttccagcttactgatcgccggcactttcttgctgccctgctgaataatatgcaacgccagtgaatggaaagttcgcgcggcaatctcgtcagttcccaaccgctcctgaatacgttcatccatttcctgagccgcctgacggccaaaggccagtaggaggatctgatccgccgctgcttcgccgcgatttaataaccacccggcacgagcgaccagtaccgacgttttgccgctaccggcgccagcaagaaccagcagcgaacgctcgccgttaaccaccgcccgcgcctgcgccgggttgagcggcgaagactcaatcttatcgaagaaaccgcgatactgttccagcatagcttcggtataggcttgattatgcgccaggcgagcctcgtcgatatcgctaagccaacattgacactggcgccacagttcgcggcaattatcgaattcatccagacggctctcagggaaaggtaatccggttaaagcccggcggattttatcctgcacgtccgcgacctgctggcgcgtcaaccacttaccttcggcgctggctcgttcaatttcacttaactgctggcgcagcaagtccgcggcgatttcgctcatctccgcgctccactgctgccagagattattgagatgatgaaagaaatgctgcgtctcagtccattcggtaccatgcaaacgcacaactttgctttccggcagcacgaactccagctcgccccacacaaggccacgcttacattgaactgacaataactgattgaaaggtataagatactcatgacgatcgcctgagactttgaccccggcattaagcaactgcacccgatcataaggatgctgtgccatgcgtttgcccaatgttgtcgctttaagttccatatatcgccaaatttcaatcagtttgaatgtttttaagtttaaccgcccgcgagcaggtgctccagcgcaaaaaaacgttacaattgccgggtcttattatccacagggttaaccagagggtttatgcgtaccattctgaatattttgaactttgttcttggcggtttcgccaccacgctcggttggctactggcgacgctggtcagtattattttgatcttcacgttaccgctgacgcgttcatgttgggaaatcaccagactatcgctgttcccctacggtaatgaagcaattcatgttgatgaactggaacctgaagcaaaaaacagtttactgaacgcgggcggcactattttgaatattttgtggttcatgttcttcggttggtggctgtgcctgatgcatattttcagcggtattgcgcagtgcctgaccatcattggtatccccgtggggatcgccaattttaaaattgccaccattgcactttggccggtaggacgccgcgtggtctccgttgaaacggctcgcgccgcgcgcgaagccaacgcccgccgtcgctttcagtaattgtacggaacactgttatgttaagccccctgctccgccgttatacatggaatagcgcctggctatataacgccaggatatttattgcgctttgtggcaccacggttgcgccgtggtggattggcgaagtcaaactcaccatcccgttaacgcttggggtggttgccgcggcgttgaccgacctcgacgatcgccttaccgggcggttacgtaatctcgctattacgctggtctgcttctttattgcctccgcgtcggtggagttactgtttccatggccgtggctgtttgctattgggttaaccctgtccacgacgggttttatcctgctcggcgggctgggtcaacgctatgccaccattgctttcggcgccttactgatcgctatctacaccatgttaggggtcactctgtataacagttggtacctgcagccgctctttttgctggctggcgccatctggtacaacgtattgacgctcgcagggcatcttatttttcccatccgcccactgcaggataatcttgcgcgcagctatgaacagctggcccaataccttgaacttaaatcccgactgttcgatccggatatcgaagatgaaagtcaggccccgttgtacgatctggcgctcgctaacggcaagctggttgcgatgcttaaccagacgaaagcgtctttactgacacgcctgcgcggcgaccgcgggcaacgcggcactcgtcgcacccttcagtattatttcgtcgcccaggacattcatgagcgtgccagctcatcacatattcagtatcagacgcttcgcgaccatttccgctacagcgatgtgatgttccgtttccaacggatgttgtcaatgcaggcgcaggcctgtcaaaaactttcccgcgccattctcttacgcatcccgtatcagcatgatgcgcactttgaacgcgcctttatgcatctggacgcggcgctggatcgcgtccgcgccagcggcgcgccgcaagatcaggtcaaagcgctgggttttctgctcaataacctacgcgctattgatgcgcaattggcaactatcgaatcggtgcagaccagcgtgctggccagcaaccatcccgaaaatctgcttgccgacgatcgccctagcgggtttagcgatatctggttacgactgcgcagcaatatgacgccggaatcggcgcttttccgccacgcggtgcgaatgtcactggtgctgtgcgcgggctatgcgttcattcagtttaccggcctcaaccacggttactggattctgcttaccagcctgtttgtttgtcagccgaactataacgcgacccggcatcgtctggcgttaaggatcatcggtacattgattggcgtcgcgatcggcctaccggtgctgctgctggttccctcggttgaaggccagctgctgctcattgtactaaccggcgtgctgtttttcgcttttcgcaacgtgcagtatgcgcacgccacgatgtttatcacgctgctggtactgctgtgctttaacctgttaggtgaaggattcgaagtcgctttaccgcgtatccttgatacgctgatcggctgcgccatcgcctgggcggcagtgacctttatctggcctgactggaacttccgtaacttacctcgcgtactggatcaggccatcaacgctaactgccgttatcttgacgctattctcgagcagtatcatcaggggcgcgataaccgtcttgagtatcgcgttgcccggcgtaacgcacataaccgggatagcgaactggcatcagtggtatcaaatttatccacagagcctaaagcagacaacacgatgcgtgaaacggcattccgcctgttgtgtcttaaccatacctttaccagctatatttccgcgttgggggcgcacagggaaaaactgacaactccggaaatactggcattactcgatgatgccgtctgctacgtcgatgatgcgctgcatcattctcccgcagacgaacagcgtgttcagcaggcgctcagcaacctgcaatcgcgaattcaacatctggagccgcgagccgacagtaaagaaccattggtcctgcagcagattgggctactgctcgcactgctgccggaaatatgtcgtctgcagcgccggattgctggtcaaccggaataatcctccacgctgtatccttgtgtattagcccactcccgtagctcctggcgccgctgcgccgggagcgcggcggaatgaatgccggcaatcgcgcccgccagggactcaaggacattgattgatattcctttattatgctctctcaattttaaccagctcttttccgccccgagtgtacgcagcattttcacatcggttattccggcatggatcaacatcaactccatatggaagctgatattaggcaaattctttagtctgccggaatcacgctgatgctgcttttcgcttcgcgccgaatgcaatgacagctgcgataggtgaaacagcattttactgtcctgccatagtgcttcatctatccggtaatactttaaggccactggccggccattcttgcgcatcatcagcatcgggctgtgatgttcaacccgataagaggcgctttgttcgcaaaccctaagatagatttcgccctcagccaccatggcgaatacggtattttcaatcgccagactatacccgccgaataaaggccggctactgattttacctaagggggaaaggcactcctgaaactggaggaaccgtaattttgaaattttcttcatgatcattcctttggtaatcatgcacataaaagtaattttattaacggatccgttattgaagaaaataagtgagttcgttttgtgcagcaagatgaattttggcttcatctcaatcagctcgctgttttgcgaggcgctttcaggaaaaagttattctgcaaattgtgttacagattacagagactcgctgaatacttaagcaatgttaattgatgaacagcatatcggccccattgaggacacgcccggcagccgtgaagtaaagattaacggaggaaaatgtcgcctgcgggttcagcatagagacagtgaattcatataaataagtcgccgcagcgataattcatagccgggtagagtgcataaaatatatgcaaaaatgggaaaatgaggttgacgacgccccctggcagatatactgtatatgcatacagtaacccacaggcgagatagactatgtttacttcagctcacgcaaatcgttcaccactgacttcggcttcagtacgtcgcccttcgcacagcgtcgtcgaacattcagccactgggctgattagtgaaatcgtctatcgcgaagatcaacccatgatgacgcagcttttgctgctacctttattacagcagcttggccagcagtcgcgctggcaactgtggctcaccccgcagcaaaagctgagtaaagaatgggtacagtcgtccggccttccgctttcaaaagtgatgcagattaaccagatgtcgccctgcaatactctggaatcgatgattcgcgctttacgtaccgggaattatagcgtggttattggctggctgacggatgaacttactgaacaagaacatgaacgtctggcgctcgccgcagaagaaggtcatgcgatgggctttatcatgcgcccggtgagaaatacaagccagcttgggagacaattaagtgggctaaaaattcactcaaatttatatcattgagtgaaattaggattaatcctggaattttttttgcctcgtcaaaaaccattctcgtaaagtggttaatttcacagagatcccggtgtggtgcggttttgcgacttttcaccgcgttcacaaattaaccatatttgttaaatattgtgtatacaacccttttttttcatatgcctgaccgagttcacacttgtaagtttctaactaagttgtagactttacatcgccaggggtgatcggcttacgctgcatgtatcagcatagttaacaacgagtcacgcccccggtgaaggatttaaccgtgaggtcttatgtaccttcatggcgaattttggatgataatgaggcgcaaaaaatgaaaaagacagctatcgcgattgcagtggcactggctggcttcgctaccgtagcgcaggccgctccgaaagataacacctggtatgcaggtggtaaactgggttggtcccagttccatgacaccggctggtacaacagcaacctgaataacaatggtccgacccacgaaagccagctgggcgctggtgcgttcggtggttatcaggttaacccgtacctcggtttcgaaatgggttacgactggctgggccgtatgccttacaaaggcgacaacgttaacggcgcattcaaagctcagggcgttcagctgaccgctaaactgggttacccgatcactgacgatctggacatctacacccgtctgggcggcatggtatggcgcgctgactccagcaacaaccgtatcggtgacaaccatgacaccggcgtttccccagtattcgctggcggcgttgagtgggcaatgacccgtgacatcgctacccgtctggaataccagtgggttaacaacatcggcgacgctggcactgtaggcgttcgtccggacaacggcatgctgagcgttggtgtttcctaccgtttcggtcaggaagacaatgcaccggttgtagctccggctccggctccggctccggaagtcaccaccaagaccttcaccctgaagtctgacgttctgttcaacttcaacaaagcaactctgaaaccagaaggtcagcaggctctggatcagctgtacacccagctgagcaacatggacccgaaagacggttctgcagttgttctgggttacaccgaccgcatcggttccgagcagtacaaccagaaactgtctgagaaacgtgctcagtccgttgttgactacctcgtagctaaaggcatcccggctaacaagatctctgctcgcggtatgggcgaatctgatccggttaccggcaacacctgtgacaacgtgaaagctcgcgctgcactgatcgactgcctggctccggatcgtcgtgttgcgatcgaagttaaaggttacaaagacgtagtaactcagccgcaggcttaagtttcctacgataaaaaaccccgctgatgcggggttttttttggcctgattttgagttcagaggaaaatctcaagcaacgttggccgctacttactcttttcctaagagcacctgcagatcgtgcttcaggctcgacatcttgctggcatatttttctttatgctcggcgtcttcaattagctgtacgatggtttctgataatgtcttgcctcgccgttgcgcaagcccggccaggcgttgccagacaacgaactccagatcgatggactttttccgcgtatgctgatgctcggcgttaaaatgacgcttgcgtcgtgcgcgaatagtctgcttcatccggttagcgagctccggattcatatgctgatcgatccaggtattcaccagaacaggttcattttcgagcgtcagcaagacatcgaccgcggcttgcgcagcgctggcttcaatgtagcgggtaatcaactcaccttcccggtgcttctttaccagatatttccatttccagccgctttcaaggttttccagttgttgatatttcattgcgatctcaatgtgaccgtgtaactcatttcaggatatcagttttttctggatgtgctgagaataaatcatctttcgtgaagtggacgattccattatcagcgtgataaacgcaatcctccgtgtgcgcagacgcggtatcgggtataatcgctcgttttacatctgactaaaaaacagcgactttgaccattacgaaacttacccgaaacgacctcgctcctgatacggaaagttatcaggcgctgtttacccaggtcaatctcgccgagacagaggcatccctcgccggcgatctacaaccccgtttattttatgcgctggaacagcttctgatcacgccagccatttcatcatttatgctggtaaaggcgccggaagagccggagtatctgcattgggtagccgaagccgcgcgcagcctgcagcagcctacgacagcgctatgcggtgtacgctatcaggtcaacggcggcaacgtaaccatgtcgccggcacaaagcgcggaagacaattttgccagcaacggtccggttgaatccgccgactggattgaagcggaacagctctttggttgcgtacgccagtttaacggcgaaatttcgctgcagccgggtctggtgcaccgcgcgaacggcggcgtcctgttgctctccctgcgtgcgctactggcccagccgctgctatggatgcgcctgaagaacatggtgacccgtcagcgctttgactggttgtccattgatgaatcccgccctcttcccgttagcattccttccatgccgctgaacctgaggatcattctgatcggcgagcgtgatgcgctggctgactttcaggagatggaaccggaactcgcgtcgcaggccatttatagcgagtatgaagataacttgcagatagccgatgccgacaccctgaaactctggtgccagtgggtctggcaacatgctcgtcagctttcgctgcctgggccggcggctgacgcatggccgctgctgattgaagaaggcgtgcgcgacaccggcgatcaggagacgcttccgctttcccctctctggattggccgtcagctgcgtgaagcggcagccttctgcgaaggcgaatggattagcggcgcggagatgcaaactatgcttgagcgccgtgaatggcgtgaaggctatcttgccgagcgaatgcgcgatgaaattcttctcgatcagatcatgattgataccgaaggcgaatgcatcggccaaatcaatgccctgtcggtaatcgaatttccgggccacccgcgcgcctttggcgaaccttcgcgtatcagctgtgtagtccatatcggcgacggcgaatttattgacgttgagcgtaaagctgaactgggcggtaatattcacgccaaaggcatgatgatcatgcaggcgtttattatgtccgagctcgaacttgaacagcagctgccatttagcgcttcactaaccttcgagcagtcctacagtgaagtggatggcgatagcgcctcaatggctgagctgtgcgcgcttatcagcgcgctggccaatgtgccgatcaaccagagtattgcgattaccggctcggtcgatcagttcggtcgcgtccagccggtcggcggactgaacgaaaagattgaaggtttcttcaccatctgccagcagcgcggattaacaggcaagcaaggcgttattattccgtctgccaacgtccgccatctgagcctggcacaggagcttcgccaggcggtggctgacgaacagttctttatctgggccattgacgacgttaccgaagccctgccgcttctcacccagctgcaatgggatggtgaaggacaaacgctacgacaaaccattcaggaacggattgcgcaggcgatgcaacaagagactcgccatcgttttccatggccgctacgctggttaggcggatcaaattcgaactgatcggacttgttcagcttacacgtgttagctatcctgcgtcccgaactcaaaataaggcttactgaaaacatggtagataaacgcgaatcctatacaaaagaagatcttcttgcctctggtcgtggtgaactgtttggcgcgaaaggcccgcaactgccggcgccgagcatgctgatgatggaccgcgtcgtcaagatgaccgaaaccggcggcaactacgacaaaggttacgttgaagctgagctcgacatcaacccagacctgtggttcttcggttgtcacttcatcggcgacccggtaatgcctggctgtctgggtctggacgcaatgtggcaactggctatctgggctggctgggcggcgaagggaaaggccgcgcgctgggcgtaggcgaagtgaaatttaccggtcagattctgccaacggcgaaaaaagtcacctatcgtatccacttcaaacgcatcgtaaaccgtcgcctgatcatgggcctggcggatggcgaagtgctggtagatggtcgtctgatctactctgcaactgacctgaaagtaggtctgttccaggatacttccgcgttctgatttaccttccgtacttatccttaagtacaaaaggcgaagccttcgcaatgcgaaggcttcttttttaaagagacagtcaggcagtttgcaccctgtcctccatggcttctcgccaacctcctagccaatgggacctctgattaagggtctggtagggacacatttctttcgatctaccggtaatgccggcctgatatccacgctgatgtgcccgttccaggcgatctcgtttttgtctcttcatgcctcgtttccctcattatttgatctggtggaaaagaaaacagtggtcactaaatatgcaaccacgtataacctttaccgcgaaacgcaggcagcgtcaatgcgcaaaattcacgccagtgtcatatttgtgagctatatgaaagttcatttgtacaaaaatcgtgagccagcacaactatcaacctgatgcggcaaataaaaaagccgcggcgatttttcaggtcgcggcggctttaattatattaattttacttatggcaggcggttcaactcactcgcaattgcggtggcttcctggctccaggcctgcgccagagtcttaaccatcgcgtcatagccatcctgctgttgcttaagttcaatattgaacggacgcttgattaactgcccctgatgcttaagcagccattcaccgctaacaatgacccggccgtcgtagcggccgtggaagccgctaacggagacattaagcgtatcctgctcgctgcctaacggctgcgatgccaccacccaacccggcagttgattgctcagattcgccaccagcgtggtacgtaactgctggtccagcgggctcgcccacagattgttattagcaatcacatactgcacatcggtagtctgataaaccacgccattcccggccagataatcagggatactgacctgctcaacccacagcaaattcttgctctggttgacggcgctttgcgcgccgctctttgctaccggtaattgatagtaagttttactctcaccaccgctgctgcaggccgtcagtacgcataccgctgccgccactaaccactttttcattgtttcgctcccttcggctgcggatcttttttatccttggcctcaaataccagcgcattgctcttgtcgttgagggttttcagtaccggctgcagttcacgaagtacctgatccagtcgctgcatatccgcaaccatcttattgtaggctgccgagcccggctggaagccctgcatactgcggttcaactcgcgcaacgtgctctgcatatcagcaggaagctgctgcatcgactggcttgaagtgatcttattcaagttgtcgagcgtagtctggacacgctgcatggttttctggctctgcgccagggtactggtcgcctgctccagcagcgggttaatcggcaggttgttaatcttatcgagcgcatccatcagacgctgctggatctgtgccagaccgccgctgacggttggaatgatcggatagccgccgaactcctgaatcttgccgcgcggtggcgctttcggatagaagtcgagatcgatatacagcgcgccggtgaccaggttgccggttttcagcgaagcacgaagcccgcggttgatcagatcgtcaatatgcgcgcgaatgttcggatcgccgcccagttgattgatcagacgttccggctcgatacgtatttcaaccgggatacgataatcatcgttcaggctctgtttcaaaccggggataaagaacggcactttgccgacggtaccaagacgaataccgcggaattcaaccggcgcccctggctgcagaccacgcactgaatctttaaagaacaggacgtaatcaatatgctgggtgaacaccgaatcctgaatactcttctgatcgtcaaacaggtggtattccgttttattcgccaccggctcgccgagatcaagtccttccggaatgtcaaagctcacaccgccgccaaacagcgtcgacagcgatcccatctcgacgcgcattcccgcggacgtgaggtcaactgcgataccgctatctttccagaagcgaacgttggtcgtcaccagacggtcgttcggcgcattgataaacagctgataggtgatgcggcgcttctgcgtatcaaaggtactggtttcaaccgaaccgacgcgatagccgcggaacagcaccggatcgccaggcgagagttgcccggctttgctactttccagcagaacacggatacctttggcatccggtgaagccaatggcggcgaatccaacagcggatactgtggcgccacagaaccttctttacctggctgcaattcgatataggcaccggaaagcaaggtgccgaggccgctaatcccctcgcgccccacctgcggtttcaccacccagaacaccgagtctttatgcagcagcttctgcatccccgagttcagacgcgctttaatttctacatgtttcaggtcatcagtcaggatagcgctttccactaccccgacatcaacgctgcggctcttgatacgcgttttacccccttcaatgccttcggcgttggtggtgataagcgtcacctccggcccctggtggctgtagtggtaaaacagtatccatgcgccgatgagcacagtcacaatcggaaagatccagaccggtgaccagttcttcaccttctgcactttcgcttctccgctcttattttccatgctgttgcatttcctcatggcttggatctggttcacggtcccacaatagacgtgggtcaaacatcatggccgagaacatggtcataacaacgaccagcgcgaacatcaccgcgcctatcgccggatagatattcatcaagcctcccatacgcaccagcgccgagagtaccgcgatgacaaaaacgtcgatcattgaccaacggccaacaaattcaaccacttcataaatcaggtgcatacgctctgaatcacgcgcgccgtttccgttcgcactccagcatagccagccgatagcgatcatttttaacgtcggcaccatgatactggcgataaagataaccagcgcgaccgggtaagagccctcactccacagcagaacgacgcccgccatgattgtcgacggcattttatcgcccagcagatcggtaatcataatcggcagaatattggcgggtaaatagagcacaaatgacgtcatcagcagcgccagcgtccactgcaggctgtttttacgccgcggggtacctttggtgtgacagcgcggacactctttctcatccgctggcagcaccgccgtgcagcacgagcaggaacgcaatccctgacgaagccccggcacgccagggcgcagcggctgcttaatgaccggcattggcgcaatgtcgtcccacagccagcggcgatcgacgcactgaaacgcccgcaattgcagcaggcagaacagacaccagggaacaaagctcagcccaacgccgatatcaccataggccatgagtttaacgaagctgaccagcaccccggcgaggaaaatctccgccatcccccagcttttgaggtgaaacaaaatccgcgccagaaacgccttcaagcgtgaaggcatatgaacgcgattgaccaacaataagatggtcaccagacaaaacgccgggaccagttggacaaagagtaaaaagaacgtaccgaggctggcgtaatcctcgctgaacagcacattagggatttccagcagctcaatttcgctgctgatcccgccgactttcatataaacaaaaggaaacaggttcgccagcagcaacatgaacagcgccaccagcgcataggccgtggggcgctgccgcggcgcgtcccacgatgtggtgagcgtggtgccgcagcgtgggcatgcggctttctggcgatgctccagcggcggcaaagccaccagcagatcacattgtgggcacaatatgtgccgcgcagcatgatgatgatcgcacatgaacactcctcagcttaagcgccgtttttgagtccttcgagatattcccagcgttcaaaggccgcttccagggcctgttccgcttccgctaactgcgccagcacctgctgggtctggtcatgcggctggccgaagaaagaaggatcggcaactttttcctgcagcgtctgcagttgagtttccagatcttccagcttctgcggcagctgttccagttcgcgctgcaggttatagcttagtttgctggcagagcgtttgacactttctgctttcggttgagcgacttccgccggtttttttacaatcggctgtttattcgccagcgactgcgcttgctgtccgcgcgcgtcgtgataaccgccgatatattggccgatacgcccgccgccctcgaagatccagcactcggtcacggtgttgtcaacaaattgacggtcgtggctcaccagcatcacggtgccctggtagccatcgatcagctcttccagcagttccagcgtttcgacatcaaggtcgttagtcggttcatcaagaatcaataagttactgggtttcaggaacaagcgcgcgagcagcagacggttacgctccccgccggacaacgcgcgtaccggggtcatcgcccgttttggatggaacaggaagtcctgcagatagcccagcacgtgacgcggcttaccgttaaccatcacctcttgtttaccttccgcaaggttatccatcaccgtgcggtccggatccaactccgcgcggtgctgatcgaagtaggcgacttccagcttggtaccgacgtggatacgcccgctatcggcctgcaactggccgagcatcagcttcagcagcgtggttttaccgcagccgttcgggccaatcagcgcaatcttgtcgccacgctggatttgcgcggagaaatctttgaccagcactttgccgtcaacctgatagttgacgttttccatctcaaagacgattttgccggagcgagaagcctcctcgacctgcatcttcgcgctgcccatcacttcacggcgttcgccgcgctcgcgacgcatcgccttcagcgcgcggacgcgcccttcgttgcgggtacgacgcgctttaatcccctggcggatccacacctcttcctgcgccagcttgcggtcgaattcagcattctgcagctcttcgacgcgcagcgcttcttctttatccagcagatattgatcgtaattgcccggataggtcaccagcttgccgcgatcgaggtcgacaatgcgcgttgccatattgcggataaaagaacggtcgtgcgaaatgaagataatggtgcctttgaaggatttgaggaacccttccagccagtcgatagtttcgatatcgaggtggttagtcggttcatccagcaacagcacgcgcggcccgctaaccagcgcgcggcccagcgccgctttacgcagccagccgccggacagcgacgccagctgcgcgtcggcgttaaggccaagctgctcgatcacttcgttgatacggctatctaactgccacagccccaggttatccagctgttcctgcaggcgggccagctcatttaaatttttatcgctcggatcggtcatcacctgatgcgaaacatcatgataggccttcagatacgccgcctgttcggcgatcccttccgcgacaaaatcgtacaccgtacctgcgacattacgcggaggatcctgctgcagacgcgcaacgatcagatcctgttcataaataatacgcccatcgtccagaccctgctcgcggttgaggattttcatcagggtcgatttaccggcgccgttacgccctaccaggcagacgcgttcgttatcttcgatatgcagttcagcattatccagcagcggcgcatcgctgaacgaaagccaggcgccgtgcatactaatcaatgacattctttattcctttcaggccgcggtaatcagccagcagttgtggatctgacggttgcgggcaaaatcctgcgacagcgttttttgcgaaatttcttgcgccttcaggccaagtgccgccagcccgtcatgatccatacggaaaccgcgtttgttattcgagaacataatcgtgccgcctttacgcagcagacgttttagatcggtcatcagacggatatgatcgcgctgcacatcaaaggcatcttccattcgtttggagttggagaaggtcggcggatcgataaagatcagatcgaactgctcggtgctttcccgcagccaacccagcacgtccgcctgcatcaggcgatgcgcacggccggttaaaccattgagacgcaggttgcgttccgcccattccagataggtgcgtgacatatcgacagtcgtagttgagcgcgcgccgcccagaccggcgtgaacgctggcgctgccggtataggagaacaggttaaggaaatccttacccttgctcatctggccgagcatacgacgggcgatacggtggtcaaggaacagaccggtgtcgagatagtcggtaaggttaacccacagacgcgcgttatactcctgtacctcgataaagtcgcccttctccgccatcttctggtactgatttttacccttttgccgctcgcgggtcttcagcaccagtttattcggcgcaatccctaacaccgcgatagtcgcggcgataatatcgaacagacgctggcgcgctttgtgcgcatcgatggttttcggcggcgcgtactcctgcaccaccacccactcgccgtagcggtcgatagctacgttatattccggcaaatcggcatcgtacaggcgatagcattcaatgccttcctgacgcgcccacttttcaaacttcttcaggtttttacgtaagcggttagcaaaatcttccgccagcatcgccggcttgccgccttcgctttccgccagatgatagttcttctgtacgcagtccagcgggccgtttttggctttaaactgtttatcggctcgcagctgcaggcagctcagcaattccggcgaggcgctgaagaccgacaggttccagccgccaaactggtttttcataatccgtcccagcaggctgtgcagggcaatcagcgccggttcgctttccaggcgctcgccgtatggcgggttactgataacggtgccatacgggcctttcggcagcggattattgagctgcgcgacgtcttttacttcgaaattgataagctcgccaataccggcgcggcgggcattgcggcgcgcgcgttcaatcacgcgctcgtcgacgtctgagccgtagaagcgcgattcataagcggccagcccctggcgagcgcgcgtttgcgcctcggctttcacctctttccagatagcgtcatcgtgttgcgcccatccgccgaagccccagtggccgcggtgcaggcccggcgcacgatcggtcgccagcatcgccgcttcaatcagcaacgtgccggaaccgcacatcggatcgagcagcggcgttcccgccacccagccggagcgcatgacgattgccgccgcgaggttttctttgatcggcgccatgccggtgccatcacggtagccgcgcagatgcagaccttcgccgcttagatccagtgaaatatgcgccgtttctttgttcagccagacgttgatacgcagatcgggattctcacgatcgacattcggacgcggcagatttttacgcgtgaagctatcgacgatagcgtctttgacttttaatgcgccatactgactgttgcggatttcctcattgaggccgctaaaatgcaccgcaaaggtggcgtcagtggtaaagatctccgtccacggaatcgattgaacccccaggtagagatccagatcgctatacacgctgcactcgcccagcggcagcatgatgcgcgaggccagccggctccacatcaggctttgatacagcaggcgcgtatctccctgaaaatgaaccccgccctggacaacctggcacgccgtggcgccaagtccttccagttcagtttttaacagctcttcaagaccacgagccgtgctggcaaacagagatttcatatcgtcacttttacttaaagaaaattggtgcgcattatagccaatatgtgccctatgtcataaagttaaaggcttatttttgaacccaggggcagcgtatggtaacgctattgaaactttttattcatcccgtcaaatccatgcgcggaattggcgtcacccatgcctttgccgatattagcggcatggccttcgaccgcatctttatgctgaccgaaaccgacggtacgtttattaccgcacgccagtttccgcagatggtgaaattcctgccttcgccgcttcatgacggcctgcacttgaccgcgccggatggcagcagcgcgctggtgcgctttgatgatttcgctccccagggcgagccgacggaggtgtggggcaaccatttcaccgccttaatcgcgccagccgccatcaaccagtggctcagcggcttcttcaaccgcgacgtccaactgcgctggctcgggccgcagctaacccggcgagtaaaacgccacgacgcggtgccgctctctttcgccgatggttatccctacctgctcgccaatgaagcctcgcttcgcgatctgcagcaacgttgccctgccagcgtaagcatagaacagtttcgccctaatctggtggtcaccggcgccgcggcgtgggatgaagatagctggaaagttattcgcatcggcgaagtggtatttgacgtcgccaaaccctgcagccgctgcattttcaccaccgtcagcccggagcgtgggcaaaagcatccgtccggcgagccgctggagacgttaaagcgttttcgtaccgcgcaggataacggcgacgttgattttggccagaatctgatcgcccgcaacagcggcgtaatccgcgtgggtgatgaggtggaagtgctgacgcgcggcccggctaaagcctatggcgccggcgatagcgacgatacgctggtggccgatgcgcagccaaacgcgacggttgagattgagtggcaggggcaacagtttaccggcaacaatcagcaggtgctgctggagcaactggaacaacagggcattcgtatcccttattcctgccgcgccgggatctgcggcagttgtcgtatccgcctggaagagggtgaagtgagtccgttaaagaaaaatgcggtcgccgcggatggcaccattttatgctgcagctgcgtaccgaaaaccgcgctgcgcctggcgccttaaaccgcctgccccaggctgtagctggccgcgctctgtgccggctgcagtctgtcgttcataattttaatcacatcgcctaactgcatcacccgccctgccagagtcaatcccggttgcgccagcaggcagagcgtggcgttttcacccggttcgaccaccagcaaattgacctgctcgccggtatcgctgatccacacgctggcggcgtcgccgctggtcggctgccagttctgctggtgagtagtgaaatgccagctcttcggcatctgcggtttcagaaaacggatcgcggttaaggcatttaatactaattcggcacgctgctctttgtttaattcaatatcgcggcatttttcttcaaaagaaaaatagagcgccgcgtcatcgacgcaaaatcccgacggcgcgaaagcgtcaggcgttaacatgcgccgggcgaaacgtgagcgaaataacataccattggccagatcgagcatcatgcggtcatgctcttcgtcgtaataccaacgccagttatcgtcaggtttaatccgcatttctacccccgtcctcttccacttccttctgcaaagcaatggcatcctgctacagaataatttctaaaattaagaaaagactaaaatgtctaaataagcaacaatgaaggaatataaaacaaccagggccggaaataaagccctggggaagattcagaaggggaaaagattagatgtgtgtaacaatttctttaatcagcggtggccctttaaaaataaatccggaataaatctgcaccagcgtggcgccagcagccagcttttcacgagcggcaatcaccgagtcaataccgccaactccgataatgggcaagcgaccatttaattccgtggccagcatacgaataatctcggtgctttttaattgtaatggacgaccactcaacccaccggtttcatcacaatgcttcatcccctggaccaatgaacgatcgagggtggtattggtagcaatgacgccatcaatattatggcggactaagctgtcggctacctggatcaattcttcgacagaaagatccggggcgatcttcaccgccacaggaacatatttttgatgtttctgttgaagttcgagctgcttatttttaataccgctgagtaaatcatccagcgcttcaccatattgcaaagtacgcagccctggggtattcggcgaggagatattaatggcgatatatccagcgtatggatagactttttccatacaaatcagataatcatctttaccctgctctaccggggtatctttatttttaccgatattaatccccagcacgccgtcaaaatgcgcttttttcacattctcgaccaggttatcaacgccgtggttattaaagcccatgcggttgatcaaaccttcggcatcgacgagacggaagatcctcggcttgtcattgcccggctgcggacgcggagtcacggtaccaatttcaattgagccgaagcccatcgcaccgagcgcatcaatgcactcgccgtttttatcaagcccggccgccagccccagcggattcttgaaagtgagccccatgcaggtaacgggtttcgacggaactttttgtcgaatcagcatttccagcggcgtgccggtgacgcggcgtaattgttggaaggttacttcatgagcgcgctcaggatcgagctgaaaaagagctttacgaacgaagggatagtacatgaactctcctggattcccggtgtgcaaaccgggggcgtattatgttcgatccgcgcccgaaagggaattgacctgcgacaaaaaatcacgcgtccaacgcaaacgtttacttctctgccgcctgttatgcgcattttggcaatttaaccccggaaaaatcatttagggaaataaacgccctctgtcacactgccataaaatgttatcaattatagataaatgcaaacatttggttataaggagagagtatgcgcgttattacactcgcgggcagcccccgctacccttctcgctcaagcgcattgctggagtacaccagagagaaacttgccgccgccgacatcgaagtctatcactggcatttacagaattttgatcccgaagatctgctttacgcccgcttcgataaccccgcgctacataccttaaatgaacaactggccggcgctgatggcctgattatcgccacccccgtctataaagcctctttttccggcgcgctgaagacgctactggatttgctccccgaacgcgctctggaaggcaaaattgtcctgccgctggcgacaggcggcaccatcgcccatatgctggcggtcgattacgccctgaagccggtgcttaatgctctcaaagcgcaggagatcctccatggcgtattcgccgatgacagccaggtcaccgattatcaacataaaccgcagttcacaccgaatctgcaaaaccgtctcgaccaggcgctggagaccttctggcaggcgctgaatcgccgcaacagccgcatcccggggctaaagacgttacagggggttgagcatgcttaatactctgcgtgccctgaccctcggcgggctactcgcgctttcctttattacgcatgcggccccgcaggcgccggaagcgttacgcatcggctaccagaaaggcagtgtcagtatggtgctggcgaaaagccatcagctgctggagcagcgctatccgcaaactaagatttcatgggtcgagtttcccgccgggccgcaaatgctggaagcgctgaacgtcggcagtattgatatcggcagtactggcgatattccaccgattttcgctcaggctgccggcgccgatctggtctatatcggcgctgaacccgcgaaaccgaaagcggaagtgattctggtcgccgataacagcccaatcaacagcgtggctgaactgaaaggccgtaaggtggcgttccagaagggctcaagctcgcacaatctgctgctgcgcgccctacagcaggcaggcctgaaattcagcgatatccagccggtgtatcttgcccccgccgatgcccgtgccgcttttcagcagggtaatgttgatgcctgggctatctgggatccctattactctgcggcgctgctgcaaggcggggtgcgcgtactgaaagatggtagcgacctgaagcaaaccggttcgttctatcttgccgctcgtccttatgccgaaaagaacggcgcctttatcgaaggggtgctggcgacctttagccaggcggatgccctgaccatcagccatcgccagcaaagtattgccctgttggctaaaacgatggggctacccgaagcggtgattgccagctatctagaccatcgtccgccaactgcgatatcgccggtaagcgctgaaacggccgctcgccaacagcaaaccgccgatctcttctatgaaaacaagctggtaccgaaaaaaatcactattcaaaaccgtatctggcagcctgcccccgcacaaggagcgaaatcatgagtctgaatatgttctggttcttacccacccacggtgacggccgctatctgggcaccgacgaaggcgcgcgcccggtagactacagctatctgcagcaaatcgcccaggccgccgaccgcctcggcttcaccggcgtactgattcccaccgggcgctcgtgcgaagatgcctggctggttgccgcttcaatgatccccgtcacccagcggctgaagtttcttgtcgcgctgcgcccaagcgtggtatcccccaccgtcgccgcgcgccaggcggctacccttgaccggctctctaatggccgagccttgttcaatctggtcaccggcagcgatccaaatgaattagctggcgatggggtattcctcgaccacaccgaacgctacgaagcctccgccgagttcacccatatctggcgcaaactgatggaaggtgaaaccgtgactttccacggcaagcaccagcacgtgcgcggcgcgaaactgctcttcccaccgcagcagcaaccgcgaccgccgctctactttggcggctcctcggacgttgcgcaggatctggccgccgaacaggtcgacctctacctgacctggggcgaaccgccggcgcaggtggcggaaaaaatcgcccaggtgcgtgagaaagccgcgcgcctcggccgcagcgtccgctttggtattcgtttacacgtcatcgtccgcgaaaccaatgaagaggcatggcaagcggcggaaagcttaatctcccatctggatgacgagaccatcgcccgcgcgcaggccgccttcgcgcaaaccgattctgttggccaacatcgcatggcggcgctgcacaacggacgtcgcgacaagctggaaatcagcccaaacctgtgggccggggtcgggctggcgcgcggcggcgcaggtaccgcgctggttggcgatgcggcaaccgtcgctgaacgtattaatgaatacgctgaacttggcatcgacagttttatcttctccggctacccacaccttgaggaagcctggagagtcggcgaactgctgttcccactgcttgatgtcaacgtcccgacgatccctcagccgcaaaacctgcgtctgcagggcgaagcggtagcgaatgaatttatcccgcgtaaagcggcgcaaagttagggagcgaactatggcagcttcttcgcagaaacttctgttacgcctcgccccctggtttttaccggtgggcaccgtgctgatctggcaattggcgtcatcggtaggctggctctcaacccgtattctcccctctccggagggggtactgaaagctttctggacgctctcggccagcggcgaactgtggcaacacctggccatcagttcctggcgcgccttacttggcttcgccattggcggctccatcggcctgacgctcgggctcattagcgggctctcgcgttggggcgaacgcctgctggatacctccatccagatgctgcgcaatgtaccgcatctggcgctaatcccattggtgattttgtggtttggtattgacgaaagcgccaaaatatttcttgtcgcgctggggacgatgtttccgatttacatcaatacctggcacggtatccgcaatatcgatcgcggtctggtggaaatggcgcgtagctatggcttatcaggattcgccctcttccgccacgtgatccttcccggcgccctgccctcgattatggttggcattcgcttcgccctcggattgatgtggctgacgcttatcgtcgctgagaccatctccgcgaatgccggaatcggttatctggctatgaacgcccgcgagtttctgcaaactgacgtggtggtggtcgccattattctttacgccattctcggcaagctcgccgattttagcgcgcaactgctggagcgcgtgtggctacgctggaacccggcgtaccgtcttcaggaggctaacgcatgaatactgctcgtattaatcccgggatcccgctcttactcaatggggtcagcaaacgctacggcgacaatgtcattctcaatgagctggatttacatattcctggcgggcaatttgtcgcggtggtcggccgcagcggcggcggcaaaagcaccctgttgcgcctgctggccgggctggaaaaacccaacggcggcgaactactggcaggcgcgacgccgcttgcgcagattcaggatgaaacgcgtatgatgttccaggacgcgcggttgctgccgtggaagacggttatcgacaacgttggacttgggctgaagggccagtggcgcgatgccgcccgccaggcgctggccagcgtcgggctggaagagagagccgatgagtggccggcggccctctccggcgggcaaaaacagcgtgttgcgctggcccgcgcgctgatccatcgcccgcgtctgctgctgctggatgaaccgctgggagcgcttgacgccctcacccgtctggaaatgcaggaattgattgtttcgctctggcaagaacacggctttaccgtgttgctggtaactcatgatgtgagtgaagcggtggcgatggccgaccgggtgctgttaatagaagaaaagaaaattggcctcgatttgagcgtggatattccgcgtccgcggcggttcggctcggcaaagctggcggaactggaagcacaggtgctcgatcgggtgatgaagcgcggcgacagcgagcgtgcgccgcgtttgtttagtcatggctaactgacgttcccggcctgcgcttcgctcggccgggctaccaaatcgcacagcgctgtagccccggtaagcaagagcgccaccggggattttgcggccgttacgccagcgctttggtaatcttctcgaacagatcgccggagagattctccagccctttcagctgttccagcgccgcacgcatcttggcctgacgtttctcatcgtagcgtttcagacgaatcagcggctcaattagacgcgacgccacctgcgggttgcggctattgagctcggtcagcatttccaccaggaactggtaaccgctgccgtcttcggcatggaacgccgccgggttgctactcgcgaaggcgccgatcagcgaacgtacccggtttgggttgctcatcgtgaatgaacggtgcttgagcaagccgcgtaccgtctcaaccacattggccgccgggctggtggactgcagaataaaccacttgtccatcaccaggccgtcctggtgccacttatcgtcatactcctgcatcaatgcatcacggcacggcaactcagccgccaccgccgacgacagcgcagccaacgcgtcggtcatgttgtcagcatgatgatactgggcttgcaccagcttatctgccaactcaacatcgccaaaagccagatagcgcaggcaggtattgcgcagggaacgtttaccgatatcggcatggtctacgcgatagctgtcgagcttgttggcgttgtaaaccaccagcagctcatcggccagctctttcgccagcgtacgggtcagcgcttcgcgcaccgccgcgatggcaatcggatcgatgatggtgaacagttcggcgatttcgttggccgacggcagcgttaaaatttccgccgccagcgccggatcgatcttctcgtcgagcaggatcgcgcggaaagcgtcagcgacgtggatcggcagcgacagcggctgcccctgctgatgacggttaacgttgagcttgatgtaggtcgccagcaggctctgcgcggcatcccaacgcgagaagtcgttacgcgcgtggcgcatcaggaacgtcagctgctggtcgctccacttatattcaagtttgaccggcgcggagaattcacacagcagcgccggtaccggctggaagtaaacgttatcaaagacgaacgtctgttccgcctgggtgacattcaacacgtggtgcaccggatggccgcccttctgcagcgggatcgctttgccttcgttatcgtacagctcaatactgaacgggatgtgcagtggctgcttgtcggcctgttccgcggtcggcggcgtacgctggctgatagtcagggtgtactgctcggtttccgggttatagtcgtcatgcacggtaacgaccggcgtgccggactggctgtaccagcgacggaaatgcgacagatcgacgttcgaagcatcttccatcgcctgcacgaaatcatcgcaggtggtggcgctgccgtcgtggcgctcaaagtacaattgcatccctttctggaaattggcttcgccgagcagggtgtgcagcatacggatcacttccgcgcccttttcgtataccgtcagggtgtagaagttgttcatctcaataaccatatccggacggatcgggtgcgccatcgggctggcgtcttcagcaaattgcagcccacgcatggtacgaacgttgttgatgcggttcaccgcgcgcgagccgaggtcggaactgaactcctgatcgcggaatacggtcagcccttctttcaggctgagctggaaccagtcgcgacaggtcacgcggttgccggtccagttatggaaatattcgtgaccaatgacgcgctcaatatcgaggtaatctttatcggtcgcggtatcggtacgggccagcacatatttagagttaaagacgttgaggcctttgttctccatcgcccccatattgaagaagtcgacggcgacgatcatatagatgtcgaggtcatattcgagaccgaaacgggtttcgtcccacttcattgaattcttcagcgaggtcatcgcccacggcgcgcggtcgaggttgccgcggtcaacgtacagctcaagcgcgacttcacgcccggaacgggtggtgaaggtgtcacgcagcacatcgaaatcgccggccaccagcgcgaacaggtaacagggttttgggaacggatcctgccactggatccagtgacggccattgtccagctcgccctgcgcgacgcggttgccgttagaaagcaggtaggggtatttggctttatcggcaatgattttggtggtaaagcgcgccagcacatccgggcggtcgaggtaccaggtaatatggcggaaaccttcagcttcacactgggtacatagcgcttcgcctgactgatacaggccttccagcgcggtgttcgccgccgggctaatttcgttgacgatagtcagggtgaaactgtccggcaaaccgccaatcaccagctgattattttcttctttatagtcactccacggctgaccgttcacctgcagtgaaatcagggtcaggtcttcgccatccagacgcaatggcacatcagacgcagccgcgtgacgggaaaccttactctcggccgtgacaacggttttcgcggcatccaggtcaaaggtcaaatcaatatcgctaatcagataatccggcgcacggtagtcgtggcggtatttggcttggggctgttgtgtcataaaaaacctttagcgtgtctgtaaagtatcggctccagtctattcctgttgcgcagatcgcgctatgcagaatcttcatcttttcaacgttcaacacgaaaatcgctacatattgataacacatgaggcacgaaatgcgctcgacccggcgcaaagcttgtggtgtgatccgtgttcaatatattaaactaggcctcgcaaatgaccgtcagcgttaccgtcgagccatcgcagcaggacagcaccgggtattaaaggtatactccgcctccttttttctgctttggtttgaatggaacgccccagtgagaggatgctactgcgcaccatgacacaattcacttctcctgtactgcactcgctgcttgatacggatgcctataagctgcatatgcagcaggccgtcttccaccgctactatgatgtggaggtggcggcagagttccgctgccgcggagacgacctgctcggcatctatgccgacgcgattcgcgagcaggttgaaaccatgcgcgacctgaagctgcaggacgatgagtatcgctggctgtccaccctgccgttcttctcgcaggactatctcgcctggctgcgcgacttccgttacgacccaagccaggtcaccgtcatcaacgatcatggtaagctgaatattcgcctcgccgggccgtggcgcgaagtgatcatgtgggaagtgccgctgctggcggtcatcagcgaactggtgcaccactaccgttcgccggaaatcagcgtcggcctggcgctggagacgctcgaacataagcttgccgacttcgccgacatgaccgccgacatcgatatgtcggcattccgcctgatggatttcggcacccgccgccgcttctcccgcgaagtacagcaggctatcgtgcagcgcttgcagcaggagccgtggtttgtaggcaccagcaactacgatctggcccgccgattgaatttaaccccgatgggtacccaggcgcacgaatggttccaggcccaccagcagatcagtccaaacctggccagcagccaacgcgcggcgcttgccgcctggctggcggaatatccggatcagctgggtattgccctgaccgactgcatcaccatggacgctttcctacgtgatttcggtcctgaattcgccacccgctatcaggggctacgccatgactccggggatccgctggagtggggcgagaaagcaatcgcccattatcagaaattgggtatcgacccgatgagtaaagtgctggtgttctccgataacctcgacctcggcaaagcggtcgatctgtatcgccacttctcctcgcgggtgaagctcagcttcggtatcggtacccgtttgacctgcgatatcccacaggtgaaaccgctaaatatcgtgataaaactagtagaatgtaacggcaagccggtggcgaaactctccgacagcccgggtaaaaccatctgccacgataaggcgttcgtccgcgccctgcgcgaggcgtttgacctgccgccgattaaaaaggcgagttaatttcaacaaggagcctggcaggctcctttttctttattaattattatcaaattatccctttatgatgcgaattctgcttgtctgatggaagatgacaggtaacatagatatccccccgttgcaggggaagagacttttttattggactatatagagagaatattatgagcgttgtgcctgtagccgacgtactccagggccgcgttgccgttgacagcgaagtcaccgtgcgcggatgggtgcgtacccgccgagattctaaagctggcttttctttcctcgccgtctatgacggttcctgctttgatcctgtacaggccgttattaataattctctgcccaattacaatcaggaagtgttacgcctgaccaccggctgctcggttatcgtcaccggtaaagtcgtggcctcccagggtcagggacagagctttgaaatccaggcctccaatgtggaagtcaccggctgggttgaggatccggacacctacccgatggcggcgaagcgccacagcatcgagtatctgcgtgaagtggcgcacctgcgtccgcgcaccaacctgattggcgcggtagcgcgcgtacgtcacaccctggcgcaggcgctgcaccgtttcttcgacgaacagggtttcttctgggtatccaccccgctgatcaccgcttccgataccgaaggcgccggtgaaatgttccgcgtatcaacgctggatctggaaaacctgccgcgtaacgaccagggtaaagtcgacttcgataaagacttcttcggtaaagagtcgttcctgaccgtttccggtcagttgaacggtgagacctatgcctgcgcattgtccaaaatctataccttcggcccaaccttccgcgccgaaaactccaacaccagccgccacctggcggagttctggatgctggagccagaggtagccttcgctagcctcaacgatgttgccggtctggcggaagccatgctgaagtacgtcttcaaagcggtactggaagagcgtgcggatgacatgaagttcttcgccgagcgcgtagataaagacgccatcgaccgtctgcagcgctttgtctctgctgatttcgcccaggttgattacaccgacgccgtcactatcctggaaaactgcggcaagcagtttgagaacccggtgtattggggcgtggatctctcctccgagcatgagcgttatctggccgaagagcacttcaaagcgccggtggtcgtgaaaaactatccgaaagacattaaggcgttctacatgcgccttaacgaagacggtaagaccgtcgccgcaatggacgttctggcgccgggcatcggcgaaatcatcggcgggtcccagcgtgaagagcgtctcgacgtgctggacgcgcgtatggccgaaatgggtctgaataaagaagattactggtggtatcgcgacctgcgtcgttacggcaccgtaccgcattctggcttcggtctgggcttcgagcgtcttatcgcctacgtaaccggcgtacagaacgttcgcgacgtgattcctttcccacgtacgccacgtaacgccactttctaatcgcgtttcgttaaaatactgacaaggtcggcgcaagccggcctttttttatgtcaattttcgtgaacgaatttcaacaaacttaaacatcaaccttcacaattcgtaattatgttactcactatttccttacccttcgtacgtagatttcgcaccttatgttaagaaacaagtgaatacactgattgatttgattattttttaatcattctgcgcacgttatgcaaaaatagcgcctgagcaaaaaagggaccgaattgagctaaaaaataatcaaatctgtctttagcgaaaatattcataactaattcatatagatatatatgagaaggtgacaatcttcgcaaagtggaacggaattttgattgagttcacaaagttccaaaaaatacatatttagttacatgttttttcttttcgtaaccaatttacgatattggtagcattttccggctagcgaaacggcactaccgatggaaagatgccttcagacaccaaactatcttcaatagttctgtaaattttcattgacggaaattattgctggcggtggcaagtgtcatataaaaaatattaatgagggtaataaataatgatgaagcgcaatattctggcagtggtgatccctgccctgctggtagccggtgcggccaacgctgcggaaatctataacaaaaatggtaacaaactggatttctacggaaaaatggttggcgaacatgtctggaccaccaatggtgacaccagcagtgacgacaccacctatgcccgtatcggcctgaaaggcgaaacccagatcaacgaccagttgatcggttacggccagtgggaatacaacatggatgcgtccaacgttgaaggttcccagaccaccaaaacccgtctggctttcgccggtctgaaagcgggtgaatacggttcattcgattacggccgtaactacggcgccatctacgacgttgaatccgcaaccgatatgctggttgagtggggcggcgacggctggaactacaccgataacttcatgaccggccgtaccaacggcgtggccacctaccgtaactcagacttcttcggtctggtggacggcctgagctttgcgctgcagtatcagggtaaaaacgatcacgaccgctcaattcgcaaacagaatggcgacggtttcagcaccgcggcaacctacgcgtttgataacggtatcgcgctgtctgcaggttacgctaactccaaccgtagcgttgaccagaaacgtgacggcaacggtgacaaagctgaagcatgggcaacctctgccaagtacgatgctaacaacatctatgccgcagttatgtactcccagacttacaacatgacgccggaagaagatgaccacttcgcgggcaaaactcagaacttcgaagccgtagttcaataccagttcgatttcggtctgcgtccgtccctgggctacgtgcagactaaaggtaaaaacctgcaggctcgcggtggcttcggcggcggcgatgcggacctggttaaatacgtagaactgggtacctggtactacttcaacaaaaacatgaacgtgtacgcggcgtacaagttcaaccaactggatgataatgcctacactcgcgcagctggcgtagccaccgacgaccaggctgcggttggtatcgtttaccagttctaatctgtagtacaccccttcgtgatatgcctaaaaagcaggacttcggtcctgcttttctgcgttactaagacgaagatcgtaacttgcaaaaaccttctcgctttttgtcgcaaacggttggcaatttgtaaatctaccgttaccctgatagcggatttccctcagtaatcacaatggaacctcgtcatgtttgagaacattacagccgcccctgccgaccctattctgggcctggccgatctgtttcgtgccgatgaccgcccaggcaaaattaacctcggaattggtgtttacaaagatgagacaggtaaaacgcctgttctgaccagcgtaaaaaaagccgagcaatatctgctggaaaatgaaaccaccaaaaactacctcggtattgatggtattccggagtttggtcgctgcactcaggagctgctgttcggtaaaggaagcgcaattatcaacgataagcgcgcccgcaccgcccagaccccaggcggtaccggcggcctgcgcgttgcggctgatttccttgccaaaaacaccgacgttaaacgggtatgggtaagcaatccaagctggccaaaccataaaagcgttttcggcgccgccgggctggaagtgcgcgaatatgcttattatgatgccgccaaccaccagcttgatttcgacggcttgctggccagcctgaacgaggcgcaagcgggtgatgtcgtactgttccacggctgctgccacaacccaaccggcatcgatccgacgctggaacagtggcaacagctggcgcaaatgtctgctgaaaaaggctggctgccgctgtttgacttcgcctaccagggcttcgcccgcggtctggaagaagacgctgaaggcctgcgcgcgtttgccgctctgcataaagagttgctggtcgccagttcttactcgaaaaacttcggcctgtataacgagcgcgttggcgcctgtacgctggttgccgccgatcaagacaccgtcgatcgcgcgtttagccagatgaaagcggtgatccgcgccaactactctaacccgccggcgcacggcgcctccgtggtggcgacgattctcagcaacgacgcgctgcgcgccatttgggaacaagagctcaccgatatgcgccagcgtattcagcgcatgcgcttactgtttgtgaataccctgcaggaaaaaggcgccagccgcgactttaccttcatcaccaaacagaatgggatgttctcatttagcggcctgaccaaagagcaagtactgcgtctgcgtgaagagttcgctatttatgcggtcgcatccgggcgtatcaacgttgccggcatgacgcctgataacatgtcgccgctgtgcgaagccattgtcgcggtgctgtaattttcagccgtgacacataagaaaaaggccgcagacgcggccttttttatttctttaaggtcaggcattaccagaccggcatttcatcctgcaggaacggattatgcaggcgctcataccccagcgtcgataacggtccatgaccggggataaacgtcacatcgtcgcccaatggcaacagcttacgtttaatcgcatcaatcagctgaccgtggtcgccgcgcgggaagtcgctgcgccctactccgcccttgaaaatcacatcgccggaaatcagcaggcgagaggcatcgtcaaagaaaaccacgtgccccggcgtatgacctggacagtgcaatacctgcaaagcgatattgccgacggtcaccacatcgccttcatttagccagcggtccggctgcaacggctgacattcatccagcccgaacatacggctttgcgccggcaatccttccagccagaactcatcttctttttccggtccaataattggcacaccgtaatgttgcgccagctcggctgcagcgccgacgtgatccaggtgaccatgcgtcaacaggatctgcatcaggctgacgcctgccgccgccacttcttccttgatgcgctcggcatcgccgccaggatcgaccagcgcggcaagccgggtttgttcacaccagattaaagaacagttctgggcgaacgccgtgaccggaataatacgatagttcatgatgctcctttcgttaccagtgccgtaccggaccggtatcaatatgcacaaagttgctacgtgggtagtatcctacaccacctgagcgcatagataacgccgctttgcgaatattgcttaaggcaacgccttcaatgtggaaatccatcgcctggcctttggtgtgatagctgtgtttcgctacaccacggcttcgtgcgcgaagttcatcgttggtatcgacggagcgataaccggagatgagctggacaggcttgttggtgccgagtagtccctgcaggcggtaaagctgatcgaacaatcctgggtcaatagacttaattttgttcgcgcggaaatcacggaaaaagtggttaagtcttgctaattcatcctgaatatagcctctaccatcgaaaaactccgccttgagtgattcaccggtgtgcaggttattcagcgtcaaaatacgcggtcggggggtcgagagggtggcaaatgccggcgcagggagaatggcggcagcaccgagggcagcgccacccaacgccagcaatctgcggcgattagcgtcaaatttgtccatgataatcaggtctacaggtaaatgaatcgtaatatacttttccgctaaaacgtccttggctgggtcgtattgaccgccgcaacacatttttgcggattatatgtatatgcacttctggcgcacgaaaggcaccttaccgggcattattgccaacgtcaaggcagcctcaccccaggaaatacgggccttgtagacgaccagggcccgatttcgttcagtgctaggacaacatttttcgcagaactacttcatttacctgattaattgttccgcttttggcagaatttgtgcgctggatcgcgcggtgagatcgtaattgtaaatatctgttcgatattgtgtacgtccatcagcgccaacaaaggcggttaaataatataaattaaccggaatattttgccgaatattgacgtagcgcgtatccccctgcttcagcgcgtcggaaatgcgtgaatcattccagcccgcatcctgcaatagcatattcgccagctcagaggctttattgacgcgaacgcagcccgagctcaacgcgcgaacatctttctggaacagattgtggttcggcgtatcgtggagataaatagcatccgagcttggcatattgaacttataccgccccagcgagttgcgtgcgcccggcgcctgctggaaacggaacggtagattcttctcggtgatggtagaccaatcgacaccatacggatcgatagcttctttgctgttccagccgcgcatcaacgtatagccatgctgctccagatagcccggattgttgcgcaccttcggcagaatatctttgcgcgccagcgtcggcggcacgttccacggcgggttgaccactacgttgttcaacgcgctgctcatcatcggcgttttacgatccggacgaccgacaatgaccctcgatgccagcacctgactgccgtcctgatagtagaccagcgagaacgctggaatattgaccatgatgccggtggacaatttgctcggtagcaaacgcagacgctggatattcagcgccagcaccccggcacgctgcgccgaagagacgttcagccagtcgcgggtggactggccgatgacgccatcagcgcccagcccttgccaggcctgaaagcgcttaacgccttctaccagttggcgatcgtaaacgccacgcgcggcgggttttgctttcgacttcggtttcgccgatgggctaaccacatcgcccggtaaggcgattttcgccgaatcatccagcatgccggtacgctgcaggatttcacgcagcgcgccgatatcgttactccactctcccggacgaagcgaggcgttgctggtcagttgcggccacggacggttatccgccaccagcgtcagcagcgcctgatgcattgcttcatattgcgaatgttgtggcgccagtccggcaataaactgtggtagcgaaccgttatccagcgccagctgccactggttaatcaccgacagcggcggcgtcgccattttgtacggcgttgagccatacagccaacggttcccctgcatcggaataccgctaataaaatgcagatatcccatcatggcatcggaaagcacgacatcgcgagccatgccgctgacggacggatccgtcagcaggctcacccaggtggtgaactgcggctggaaaccggcgatagcgacctctgccagctgctgctggaaggcctgtactgcttcgcggttctcccacatgggtttcatgtcgcgggcagcgtatagcgccaccagcgggttgatataaaccggatgataacccgacggcagcatggcctcgatttcagcacggcttttcgccaccgcatccgccgccagcggctgctcgccggccatttgcgcgaccgcagcggactgaccatcgttttgtaccaatgccgacgacagatcgcccaccgtcgcggaactatcagtgggtatgacttcaggctctgcggcctgaacattaaacagcggagcaaatgcaaaagccaggctcaagctgagcaccgacaattgtcgaccataccgtttctttagcaacatcccttgccccctgttaacacattgctgcccgcctgatggggcttattctcagtatataaaggcgaaaacgcttttgccttaccaaatgtaaagaagtttaaagactataccttgttagcgtactgtacagaaaaacaaaaagggcgacaaattgtcaccctttttcctattaatcgacgccctttcaggaggcgtcagcggttccaggcagcgcttccggcaccggcgcggcaaaaccgcgcagcccgacaacgtgtacatgttcgtgattattgaacactttacgcaccagtttataggtggtgcctttttccgggctgatattttccggcgccgcgataattagctgcatctcgagacgttcacacagttcgaacagcgtggcgatagagcgagcatccagacgtgctgcttcatcgaggaacagcagacggcaaggcgagatatccttgccgcgcaggcgacgggattcatcttcccagctctgcaccaccatcaccagaatcgacatcccggtaccgatcgcttcaccggtcgacagcgcgccggactccgcacgcagccagccgtctgaaccacggttaacttccacttccatctccagatagttgcggtagtcgagcagttcctcaccgatggtttgcggcgtacgttgccccatgtcaatctgcggattcaggcgctgatacagtttggccagcgcttccgagaaggtcaggcgattgctgttaaacagatcctgatgttgctcatgctgttcagacaggacatccagcagcgtcgagtgggtctcgcgcacgttgacgttcagacgcacgctgttgacctggccgaacgacacgctctgcagcccctggttgagcatgcgaatacggttctgttcacgctggatggtcttgcgaatgatattcgccacgctgcgggagctaattgccagcttctgttcgcgattggtcagctcttcggtcagacggctgagctcgatttccatctgctcgatcgcttctaccggatcgtcagtgcgaataatatcctggcggattcgctcgcgcagatgctgataaaccgcaacgaagaactgaattttgcgctccggacgtttcggatcttccgaaatacgcaggacgtcgcgcaggtgttcgttatcggcgaccgccagacgcagcgcgcccagcgccttatccgacatcgaacgcagttcgtcggcggagagataggccagctcgcggcggtgcagacgacgttccacgccgttgtctttcaccagacgcatcaccgcgcaccatcccgctttagcgctcaccacctgctcgcgcatttcgcagtaatcgcgctccagcttgcgcagtttgcgggtcaggttgtccatctccgcttcgcagaaggtcaacgctttctccagctgattacgacgggagcggttgttgctcagctgcatatgaagttcatcacgacgcgcacgcgcacgctcttccgcgccggtatcggcgcgtacgccgatatcctgcagctctttatacagatcgttgagcagctctttcttggtgtcatacgagcttttcagcgacgccagcacctggttgtactggttcaactgcgcaacgtggctacgcatcgcttcgcgagcgcgactgcgctcagattctgcttgttgcaggcgctggcgcagcttctcgttgagatcgctgttgccgctgagcatctccgccgagtcagagtagctgaagtgggcgcggcgctgcacgacttccgccaacgcgaaagcctgctgacgcgcatcgcgctgcatttgctgcgaataggcatagtcttctttcagctgttcaaactgttccgggtcgctttgcagtaccgagacgatcggttccagtttcgccagctgattgccatgctgctggataaagcgcgccgcttcctgcgcttcgtccagacgctcctggatttcatctacgcgatcggccagcgtctcatcggccagcagattcagacgcggcagcaggcggttaagcgccgacacgccctctttcgcctgttcgtactgaacgcggttctgctggttatcactttcatgcgcattcagcgcacgctcgagttcgccgcggcggctattgagtttgcggatctcttcttccggatcgtcatcgaaggcaaccgccagatggctgccgatgaagcggctgaaggcctgatgcaggcgctgcgttttctgcacgtcaaacgacagcgtagcaaaacgctcggagagactttcacgctcggcgtgcagcgtttcgatgcggttttcacgggcggcgcggccaaacagcggcagcgtcggaaaacgcgaatagcgccactggcggtcggcaatcttcaccaccaccgctttttccagctcatcgacgctgaatacgctgtcatcgaaggactgcggatcgccttcgatcagatacaggtcttccgggcaatcttccagcccttcgagctgctccgccaccagtgacagatccggaaccacgatcgcatggcgcgatgggccatacagcgcggagaagtacggcgcatcgtcgaggctaacgtcgtcatagatttccgacaacagcacgccgccaaagcgctccgccagcgcgttcagacgcgggtcttcagagccgcccggttggctgagacgctcaatttcttcgtcaatggcgcgcttgcgggcgccgacttcatcgcgctcaacaatggcttcgcgctcgcgctccagcagctgctgcaggtattcggtgacgtcctggcttgattcaaactgctcgccgctctgctcgcacagttggttgaggctgttttgcgccgccagccaaatcggcgcccggcgcatcagcgtctgggtacgcgactgcagctgctcaagctcctgacgcagagccatgcgctgttcctgagcgttagagacgctgtcggccaatgaggcaatgcgcgcttccagctcctgatgcagcgtttccaaatcgtcgatatcgtagcgtttgccctggcgcttacagaactcggccagctggcgctcggcgtcctgttgttcacgcaggcgctgttccagctcgttgagacggctacgcagtccatgagcctgctccgccagatgacgctggttgacgccatcgcgtagtaattcacgcgccacatcccaggcttcattacgcgccagcggaccgttgatcgccgcaaccagctgatacgcttgttcaaactggctgtgcgcggtttgcgccacgctcattttctgttccagcgacagcattttttccgtcgcttccagctctttcgcctggaaagtttccagccattcgtcggcgctgtcggcggttaaatccggcaggtgacacagcgcacgcgcgcgttccagcgcctgtagcgcctgattgtactgaatggcgcgagtctgctgcacgtcgagcgcctgctggtaatcggcgagctggctcttcagctcatccacttccagttcggcggcctcggcgcgggcttcgttctcttcctgctggtcggcggcttccgccaccacttcattttgctcttccagacgaatctgcagttcgtcgagatccgcctcgtagcgctcgattttttcttgctgacgcagggcggtttgtaccaggttcaggtgatcgctggcggcctggtagtcggcttccagatcgccttctgcgccgttgtgttcctgcagctcgcgcgccatatcgacatgtttgtactgctctgccgccagctgcgaacgcgaggtaaagagctcgcgacggtactccagcgctttatccagatggatgcgccgctcgttggcgtgacgcatgtagtccgccgccacgtagttggtggcttcactgataaggtgcttaaacagatcgcgatcggactgggtaacgcgaatcgcttccagggtcatacggttttcacgcagcgccgcttccatatcctggaatgccttacgtacgccgctgttttccggcagcaggtaatcgcgcagggagcgggtaatggtgctggagatcccgccgtacagcgaggcctcaatcaggcggtagtatttgctacgatcggatgctgaacgcagacgacgcgctaccacgcccaaatcaaacatcagcgagtgatattcggtaatcgagttaaactgtttgaactgcaccccttccatcgcgtcgagcttctctttcagctcgttgaggctcacgacgcgcgcctggcgctcgttaagggtttcggtcaacagttgggtcggctggatcgaggttggcaatccctggatggcaaatggcttaatatcgactttacggtcgcgcccggcaacctgctgcagacgcacgccaaccaccacacgctggtggcgcgagttgatcacatcaagcaccgagtaacagacgccggcgcgcagtttaccgtgcaggcctttatcacgcgaaccgcttgtggcgcccgcttcggtggtgttacggaagtgcagcagggttaaatccgggatcagcgctgtgacgaaagccgccatggtcgtggatttaccggcaccgttacccccggaaagggtggttaccagctcatcaagatcgaaggtccgggcaaaaaaaccgttccagttaaccagcgtcagcgagcgaaacttaccgcgttcaatcattattcttcctccccgctatccggctgattctcttcattctcatcattgagctgcaggtgattctccagcgccatcgcttcgccgtcgcggatcatgcgcagctgcgcttcgcgcggatcgtcgccaacgcgcacgtcagcaccaaagcggaagaccgattcggtgatgcggaatttactgctgtcgtggcccataaaccacaccatgccgaggcggcgcaggcggttgagggacgcgcgcattttttcctgcagcttctggcggtcgaggtcggaaccggtggaacggttgttgaccagcttcagcaatttgctttcatccgccagcgtcagcagctcatcgtagagctcttgctgagtgaagatgccttcattagccagacgttcggggctgaggtagaggtagcacagaattttgccgaccatcatatccagctctgataataccgagcgcgggatcaacgtcgtggagcgcggacgcaggtagaagaacccctccggcgcgcgaatcagctcaacgttgtagcgcgcgtaaaactcttccaggtaatcctgaaaatccatcaaaaatgcgtgattatccagctcatccaggccaatgtggcggcccgcacgcagggcgctgtccagcgccggaaataacggattggccaacgcctgcgccagcttagctggcatcacttgttcaatatttgtcaatgacatgcgcctgtaccttggctccgtaatcattaatcggctgccattttgccggcagtccggtgaaatctgcctgggcgacgcccagctgtaccgcctggtcaacaacgattcgcgcgacgtcaaagtgacgcgcgcgcggatactgcgccagaaactctcgcgccaccaggccgagatccagcggcatacccttctctttgtagaccgccagctgcgcttcaatcagcgcggccagctgctcgcgaatttcgttgaactcttcgaattcaaggtctgccggcagctcgccggtgacttcttcatcgcgcagcgccatctcttcatcgcgcatatccagcaaacggtcggcgctggcataggtcagcgcccacggtgcgtcgaagtaggtctgtaccgactgacgcaaacgctgggcgaacacgcggtttttatccatatcgatggcggtacggataaatttatgtacgtgacgatcgtaaccgatccacaggtcgatagcctgttgaccccagctgacaatacgatcgagcttgctttgcaggtcgaacaccagacggtcgacaaaatgcagatcgtcgcgcgcgatggtggcgtcctggatacgcagcaggttggcctgtagcttatcgcccgccgcatccagagtatcttgcaattcgcgcagagtgccggaggtttcggacagcaacagttcgcagctggaaatcgccgcgcgccagtctttgttcagcaactgggcgatatcgtctttcacctgctgttgctgctcatccatgatgcgttgagtcagatcgatactatcgaagatttccgccaccgaatatttcagcggcgcaaagacgttgcgatgccagtggaattcatcgccgccctcatccgcggaatctgcagcccgcttcagttcgccggccacaatcgacagctgcatcgacaaacgcagggtggagaattcacgctggcgaatatagtagtcggtaatgccaatacctaacggcgtcaggcggtagatcgcattcccttccgttatttcgctggtaaagcggttcagcagacgctggcgcaccatatcgttgatggcgttattggcgcgctggctgatggtttcgctggtctgctcaaacgcatcactgacgtggcggaacgcgtccaccagttctccctcggtcatttccccttccagccgctcgccgttcagcgtggcgacagccagcagaaaagagagtctgtcgaccggcagcgagatggaaaaatcatttttcctggcccaggcaaccagttcggggactgtctgggaaaattcactcatagtttatccttgcatctgcggctgtgcgcctggatctttcttaagcgcagtgacatgaatatagcggcccaggctgatatacggctcctggcgacagtagcgcgtttccagctccagcagcgcagtaaagctgtcatgctgtttacgtttctcacgcagataatcatgaaacacccgcacgccggttttaccggttatctgccaaccgagagcttccagccagccgtatacctgctgcggatcgcgcggataatccggcgacagcgtgcgttttttctttttcggcatgccgatttgcacgtagtcgaagtttccggcgaccatattgtgcatcagcaggccgttagcattgtagaacattaacgacagcgcgccgcccgcgcgcaataccgaccacagcgtgcgcaacatttcctgcggttccgcgacccactcaagcaccgcatgaaacagtatcagatcgacggggctttccaaatgctgagcaatatcctgcgccgcgcattgtacaaaatgcatgttgtcgatcacacctttatcgcgggcggcctgctgagcacgagccaccatttcggcggaaagatcgcatagcgtcacgtgatggcctaattccgcgacgcggatcgccgtttgcccttcgccgccgccggcatcaagtacccgcaacggccctggccccgtctgcgcgagcagcggttccagatcctgccaaaggatcgcctggcgcagttggcccttggtggtgccataaatattgcgcgaaaacttttcagcgatgtcatcaaaattgcgatcctgcacggacgactccacaagccaacacaaaaccgctattttgtcatacccacggcgataatgaagcgatctgttataagatccgtatataactttggttatatggttaaaaaaggaaccattcgggatgcttttcacactgaaaaaggtattgggcggcatgatgctgccgcttcctctgctgttattgctgatggcgatcggcatcattctgctatggcgcagccgttttcaaaaaaccggcaaagcgctggtcaccctgagctggctgttgctggcgctattaagcctgcagccggtagccgatgggttgttaaaacctatcgaaaaaagctacccgacctggcgtggcggtcaatccgttgagtatgtcgtggtgctgggcggcggctatacctggaatccgcagtgggcgccgagctccaacctgatcaacaacagcctgccgcggctggcagaggggatccgcctgtggcgggaaaacccaggcgcgaaaatgatctttaccggcgcggcggccaaaaccaacccggttagtaccgccgaggcgggggcgcgcgtcgccgaaagcctcggcgtaccgcgcagcgcgattatcgtccttgacagaccaaaagataccgaacaggaggcggctgaagtaaaaaaagccatcggcggctcgccattcctgctggtgacatccgcgtcgcatctgccgcgagcgatgatatttttccgccatgccggactgaatccattaccggcgccagccaaccagttggcggtggaatcggcgcttaacccctgggaacgcgcgctgccgtcaccatattggctgatgcacagcgaacgcgcgatttacgagaccctgggacgaagctggcagtggctgaagggagcgtcaggcgatccagggcaggattgatttcgcggcaagcgagaaacgggcgcgatcgaagcgcccggtattcaccagattttcgacttcatcccataactgatacagccaacgccgccagacgaaagactccgctaccggcgcccgctgcaggtagcgccatagtaactgctcccctaatccgccgtcggcgaggcggaacagttcgtactcgcgcggcgcccacagcatcatccccggaccgaccatcgccaacagctgatcgctgcgcgcgtctttgagcatactacgtagcgtaaagcagccatggaccagtacgcagttatcgttgaaatcgctaaacaactgcggcaggctctcacgactgcggaataaaatgcgcttatcctgcatcgttagcccggtgtcatgatagaggttgagcgtgctccacagcatttctacccgctggcgataccagtgcggccagaggttttcctgagtgctatcgaccatccccacacagccgccgctatcatgccgatgccacgccagtaacccctcgacaatctgatcctgcagctgctcccaacgctcgggcgtgcgcgctggcgcttccactgaaacgccgcgtaaccgttcaatgagcaatacgtcaggccccggatgttcttcatgcgtcatgacgccgtataccaccggcatacgaacggtgccgctacgggcaagcagcgaaattttccacgccagctggcgcgccacgccgggcgtggtaaagcttttcgccaacagcggcatcgggtttccctgcgcatcatacagcgaccatagcgctgacgagggtttctcgctaacgcactccacgcggcttagcttctcgccaagcaggtggctcagttcggctcgcaactgttccatcatagataccctcatgaagactactgttttcataatgagcgtctgggggcgacttgtcagcggataagatcaaaaatgggctaattagcggcagaaatatgtccccttcaggcgaaggggacggcaaggattaacgcagctcggcgcggacgcgctccagatcttccggcgtatcaacgccggtgccaggaaccacttccgccaccgcgacgtggattttttcgccgtaccatagtacgcgcagctgttcgagcatctcaatttgctccagtgggcttggcgcccagctgacgtagcggcgaataaaaccggcgcgataagcgtaaataccaatatggcgcagcagggaatcgccaatttcttcgcgcgattttgcaaaacgatcgcgatcccagggaatagtcgctcgagaaaaatagagcgcatagccgtcggcatccatgaccactttgaccgcattcgggttaaatgcttcttcggcatcgtggataggcaccgccagcgttgccatcccgctggtgctggccgcaaggttttccgccacctggcgcacgatcgccgacgggatcatcggttcatcaccctgaatattgacgatgatagtgtcatcgctgaaagcacatttttcaacgacttccgccagacgttcggtgccggattgatggtcggcgcgggtcatacaaacctcgccgcccgcggcttccaccgcacgcgcgacatcttcatgatcggtggcgacgatgatgcgatccgcgccggattcgcgggcgcgttccagcacgtggacgatcatcggcttaccgttgatatcctgcagcggtttccccggcaggcgcgtggaggcaaatcgcgcgggaataatgacgacaaaactcatggctggctctcttcaaccgcgagcgagcgcgcttcgttttcaagcagtaccgggatcccgtcgcgcagcgggaaggccaggctgtcggctttacagataagctcttgcttatcctggctgtagtacagcttaccgttgcaaaccgggcaggcgataatttcgagtaaacggtgatccatgattcctcctgatggaccgaatagatttggcagcagcatatcacaggatggtagcccgcgtatcacgcggcatcaacgccccaaccttgccgctggttagcaaatagcgtcgcgggtaactggcgcagcacaatctcttctgccccttgccagcgcgcaaaatcattaattgctcgctggagtccgctctccagcccggcagtcactttaaccccctcttccagccacagcgaaaagatctccagcacgccgcccttacggtgcaacttgctgtccatcctgccaaccagttttccctgatgcagcaacggtagtacaaagtagccgtattgccgtttcggcgctggggtataacattccagccgatagatgaagttgaataactgctcggcgcgtttacggtcccagactaccggatcaaacggcgagagcacggcgctgtggctggcggttaacttaccgccggatgccgattccagcacagcttgcagatcgcggtgcagccacatctcacccaactcctcaaccatcaccggcaccaccagcccctcatcctgccagcccttcagcagcgccggtaatgcaggctggcgtagacgataataatcggccagccactgtggacgaaaaacgcccaagctgcgcgcgctgttacgtagcataatggactcagcctcctgacgggagagcgcatcgcgcccatcatcccagtgcggcatcgcacgatgggttaaatcatagacgcgatgaaaattacgccgctcaacgaccatcagtttgccggcggtgaacaacccttccagatgacgtttatgtggtttccactcccaccagccgctggcgcctttacgtggatgggaaaaatccgccgagcgaaccgggccattttgcgcgatatgctccagcaactcttctatgctcgcggcatgctcgagcatccactctttatgatatttccagcccatcttgtcgggattcaacatccggtggcgcacgagggcgaaatcgctgcgtggcaaaaaacaggcttcatgcgcccagtattccatcagttcgccgctacgcaaggaatcatccagccagtgctgcggatagctaccaaggcggctaaacagcaccagataagggctacgggcgaccacgttgatcgtatcgatttgcagcagcgacatctgctggatggtggaaaggatgtcagtctggcgagcgcgacgtcggggctttttcagtaacccttgcgccgcaagatgaagatggcgagcctcttttagcgacagttgcaataccgacatgcaggttctccgtaggggattcaagcacagcggcgagcaaagccagcacgcaggttaacgttgcgccagcgtcactaagtccgcgagcaaccgctgtgcgcgatcatcggtcattatggcgtcaaccggcagataccaccagttagcggcggcgaattcacggcattttaccgcgtctttctcggtcatcaacaacgtctgcgacggggttaccaatgcggcgactgcgctttgactcagcgcctgatgatccgccagcgccacggttttcaccggccgcacgccgcagttttctagcgtcgcgaaaaagcgcggcggatggccaatgccggccatcgctactacgttatcgagggtcgcaacatcgcgacgctcgccggtaagcaggttcaccgccatgccgggacgcaagtgcatcggaatttcacccggacgcgcgacgccgccgttgacgataacggcatcgacgctttgcaaacgggatgcgcgctcgcgcatcggcccggccggtaaccaccagccgttgccaaagcggcgtacaccgtcgatcacgacgatttctacatcccgcgccagcttatagtgctgtagaccatcatcggtgacgataatttgcaaatcgtgggcggccaataacgcttttaccgcgtcgctgcgtagcggagaaaccgctaccggcgcgccggtacgctgatgaatcaacaccggttcatcgcccgcctgcgccgtactggtcgcgtcatccagaaccaacggatagctgtcggctttgccgccgtaaccgcgagacaccacgccgacgcgaatgcctcgctgctgtagttgctccaccaaccacactaccaccggcgttttaccgttgccgccggcggtcaaattaccgactacgacaaccggcaccggcgcgcgccaggcttttttccaccccagcttatagctgaggcgaatgaaagcgctcaccaggccatacagccaggagagcggcagcaatagccgccatagcggcgattcgccggaccagatgcgcgctatcattgaccgaattgcatcttatgtagctgcgcgtaaacgcctttatgctccagcagctccagatggccaccgcgctcaacgatacgcccatcttccacaaccacgatttcgtcagcctgctcgattgtcgacagacggtgggcgataaccagtgaagtgcggtttttctgcagttcatccagcgccgcctgaatcgcacgttccgactcggtatccagcgccgaggtggcttcatcgaggatcaggatagggctgttgcgcagcagcgcgcgcgcaatagcgatacgctgacgttgaccgccggaaagcatgacgccattctcgccgataatcgtgtccaggccattatccatcttgttgataaagtccatcgcataggccatacgcgccgcttcttcaatttgctcgcgggtgtactcttcggtacgcgcataggcgatgttattggcgacggtgtcgttgaacaggtgcacgttctgcgaaaccagcgccacctggtcacgcaacgagctcagtttgtactcgcgcagatcgtggccatccagcagaatttgcccctcgtcaacatcgtaaaaacgggtaatcaggctggcgatggtggatttacctgagccggaacgccctaccagcgcaacggtttttccctccggaatgctcagattaatgttacgcagcgcggcaacctcacggccaggatagctaaaggtgacgttgtggaactccaggttacctttggcgcgctcaatcacgcgagtgccttcgtctttctcctgctcggagtccagaatggagaacagcgtctgacatgccgccatcccacgctggaactgcgcgttgacgttagtcagggatttcagcggacgcattagcgcgatcatcgaagaaaagaccacggtgatagtaccggcggtcagggtttccatgacgcttgggaagctcgccgcataaagcacaaaggccagagccagagaggcaatcagttgaatgaccgggtcggagatagaggacgcggagaccattttcatcccctgcaggcgcatcttattactgaccttgtcaaaacgcttagtttcaacggcctgaccgccgaacatcagcacttctttatgccctttcagcatctgttccgcgctggtggtcacctgccccatggtgttctgcatattcttactgatattacgaaaacgcttcgaaaccacccgaatcgccactgagacgataggcgccagcacgataagaatcagcgacaattgccagctgtaatagaacatcatggcgaacagaccgataattgaggccccctctcgcaccacggtgatcaacgcgctggaggaggatgacgcgacctgctcagaatcataggtgatacgcgacagcaatgtcccggtggactgtttgtcgaagaaggcgacaggcatacccatcatatggccaaacaggcggcgacgcatcgtcatcaccactttgccggaaacccaggagatgcagtagcttgagatataactggtgatgccgcgcagcaccattaaaccgatcactaccagcggcatccataacagtactgagcgatccgttttaccaaaaccatcatccaataacggtttaagaagcgataacatgaaggtatcacttgccgcgttaagcaccaacgccacggccgctacgattagcccggctttaaacggcgctatcatcggccaaagtcggcggaaggtctgccacgtggagagatctttatcgttctgcattcaataaaccagcttatgttgaaatagccgcatattctacccgttctaggcctctgcgccaaaccactgatgataccaacgaggtaaaagttgatcccgtaagctctggatttgccaaccatctggagaaaaaataatcgttatttgccccgagtgcggcgtatcaaaccacagatatccctgcttacgataacgctgttcgacttttttggaaggcatcttccacgcattgtaacgcgctgccgaggcgatagccgcctctcctcctacccgctgcagcaatgtcagactggatgatgtattactaccgtggtgcggaacctgaataagtgtagacgtaagatgctgccagtaatgactcatcattttctgttcggccggaatttcgatatcaccggtaagtaaaacgctgcgcttgccgtcatcgaccctaaccacacaggaaccattgtttcctttatgctcacccgcaggcaacggccaaagcgcctgaaatcgaagccctcgccagcgccaggtttctcctctgtggcagggtagatgtccacgcagcttaagcgggctacgaataacgagatttggccacgcctgaacaatcgcattcaggccaccgcgatgatcaagatgttcgtggctcaggatgactccttcaggatggagaccacgccagcgcaaccagggcacgatgagtcgctggccgctatcgccccccggccaggcggggccggtatcgtacagaatagctgctccctgacgctcgataaccaccgctaacccttgtccgacatccaacatcgtcactctccactcgcctggcgtcgcggtgcgccagaagggccaactgagtagcgccacgccgctcatacagagtaacggcatctgacgccaggcctgaaaacgccatgccaggagcgccagccacggtagtacactgatcgccaaccaccgttcgtcaagcgataaccatccggcaggcaaatggcgtaagaaccagaataatattgccagcagacgatcggcgagttgccataacgccatttcaagcaacaccgggccgcttagatgcagtagcatcgccgctaaaatcagcgggactatcagaaatgtcaccagcggaacggcaaccaggtttgctatcaatgaagtcaggctaatcccatgaaaaagccctatctgcagcggcgccagcagtaacatcaggccgcattgcaggtggcccagcgccaacagttgccgccacggtgaacgacagcggagccggcgaagcggcgcaagctgataccagaaaatcaacgcagcaaccgcaaacaccgataaccacaggctttctgaaatcatcgccagcggatcagccaacagtattgccgcaatacaacagcaaaagatttgccacggcgaccaacgcctggcctgtagccttaacagacatcctgcgcttaaggccgcacaggtacgcagcgccgggggttgcatgccggtaagccaggcgtaaaacagcgcgcagcctaacccgacaagtagcggtatccgccagcctatccagcggcacggaagaaagaactgtattccacgaaccagcaaccagccaagcgacgcccccagcgcaatatgcaggccggagatagccattaaatgggaggttcccgtctcctgcattaatctttttatctcatccgcaactgccaggcgctcccccattcccagccccagcatcaccgttttccatggatactcagcgagtgtgcggtttaacgaggccagatagcgagcccggaagctgcaacgtgaatcaagcgatgaggcatttagaaaacgtccgctaagcgggcgatgctgcgcaagagcgtagcgctggctatcgaagccgccctcatttaactgcccatgtaccggacgagcgcggatggtcatcagccagcgctgcccaacgcagcctgcttcaggtagttcgctgccgtagagggtaatcccaaccgcaggatataaacgccgaccctcaagacgaattatcttaccttgccagctcgtcaggccatcaccgcctaccagctcaataatggcctgtcggttgcgaccgggaatatgctcagtgggccacagcgcttgccgggcatgtaatattccccatacgaaaaatagcaacgtcaatgcggcatacgttgtgcaaggtttgcgcagcgttgcaatgattagcgcagcgccaatcaagcaccagacgcttagcatattcggtagcgccggtagccaaagcagcggcgaaattccgattatggcgcagcctgccagatgtggtaatcgcataacacctccctgttatcggggagtgtcagacaattcgccgctgtgatcatgcattaaagaatggcgttgcgtcgcgctatccgggaaatgttggcgcttgctatcaggtaacaaaagttttgcgagcggacgcgaaaaacagacataaaaaaagcaccctcaggtgcttttttattaagtaagtctttgcctgatgcggaaaaacttactcttcgtaaatattggcgcggtcgcgtagttctttcccgggcttaaagtgaggaacgtatttaccttccagttccactttatcgccagtcttcgggttacgcccggtgcgaggtgctcgatagtgcagagagaagctgccgaaaccgcggatttcaatgcgctcaccttgagcaagcgttgaggccatatgctccagcatttctttaacagcatcttccaccgctttcgccgggatatgagattgctggctggcaagtctttctatcaattctgacttggtcatttttcctccggtttccttcaaggcaaagttagcttacagcttaaacaagggcggccgtagccgccctttgtgcttgattacaggacgaatcctgcaatctgtcaagtaaactcgtcattattcaggccgttgtggcctgaataactaagattactcgcctttagctgctttgaaagcttcagccattgcgttgttagagaagtttgcatcttcctgtttgttaacagttgcgattgcatctttctcgtcagcttcgtctttcgcacgaacagacaggctgattgcgcggtttttacgatcaacgccggtgaatttagcttcaacttcgtcgccaacgctcagaaccagagttgcatcttcaacgcggtcacgggatgcttcagaagcacgcaggtaaccttcaacgccgtcagccagttctacggttgcgcctttagcgtcaactgcagttactttaccggttacgatagcgcctttcttgttcagagcaacgtagttgttgaacggatcttccgccagctgtttaacgcccagggagatacgctcacgttctgcgtcaacctgcagtacaactgcagcgatttcgtcgccttttttgtattcacgaactgcttcttcgcctgcaacgttccaggagatgtcagacaggtgaaccaggccgtcgatgccaccgtccaggccgatgaagataccgaagtcagtgatagacttgattttaccttcaacacggtcgcccttgttgtgggtttccgcgaactgctgccatgggttagatttgcactgcttcagacccagggagatacgacgacgttcttcgtcgatatccagaaccataacttccactacatcgccaacgttaacaactttggacgggtggatgtttttgttggtccaatccatttcggaaacgtgaaccaggccttcaacgccttcttcgatttcaacgaagcagccgtagtcggtcaggttggtcacgcgaccggtcagtttggtaccttccggataacgcttagcgatagctacccacggatcttcgcccagctgtttcaggcccagggatacacgggtacgctcgcggtcgaacttcagcactttaacagtgatttcgtcgccaacgtttacgatttcgctcggatgcttaacgcgtttccaggccatatcggtgatgtgcagcaggccgtcaacgccgcccagatcaacgaatgcaccgtagtcagtgaggttcttaacgatacctttgacttccatgccttcctgcaggttttccagcagctgatcgcgctctgcgctgttttcggattcgataacggcacgacgagaaacaacgacgttgttacgtttctggtccagcttgatgactttgaattcaagctctttgccttccaggtgcagcgtgtcgcgcaccggacgaacgtctaccagggaacccggcaggaacgcacgaataccattcagctcaacagtgaagccacctttaactttgccgttgataacaccgactacagtttcagcgtcttcgtaagctttttccagcgtgatccaagcttcgtgacgtttagctttctcacgggacagcagggtttcaccgaagccgtcttctactgcatccagagcaacgtcaacttcgtcaccaacctggatttccagctcgccctgggcgtttttgaactgctcagccgggatggcggactcagatttcagaccagcgtcaaccagtacgatatctttgtcgatagcaacaacaacaccacgaacgatggaacccgggcgggtttcgatttcttttaaggattcttcaaatagttgagcaaaagattcagtcatgtttaatcttcaggtttcatatttaacgtccacctggctccgtgccggatggggttgtttaacataccccctaacactccgttgctgcgggggtactgctataattcggaggcttgcgacgctttgccggttaacggttaagcgatagccagtttttcgcgcgcatattgtagcgctttttcaattacttgctcaatgcttagttcagtggaatcgagaactaatgcatcagcggccgggacaagcggcgccacagcacgattacgatcgcgatcgtcacgctcttttatctcggacaaaagacgttcaaagttaacactaaaacccttctcctgcaactgtagcaggcggcgctgggcacgttcttccgccgacgcatcgaggaaaattttaaccggcgcatccgggaacacgacggtgcccatatcgcggccgtcggcaatcaggccaggcagttcgcggaaggcgcgttgacgacgcagcagcgcttcacgtacacgtgggaaagccgcaaccttagaggcggtattggccacttcctgggtacggatctctgcgctgacatcctcgccttccagcaccacttccaggttgccgtcagtagaaataaaacgcacatcgagatgagctgccagcggaaccagcgcctcttctgactcgacgtctacgtgatgatgtaaggctgccagcgcaagaacgcggtagatagccccggaatccagcagatgccagccaagcgcttccgccattgccttgcacaacgtgcccttacccgcaccgccaggtccatcaatggtgattaccggaacatttgccgtcatctttttctccttcagcaaggcgcatgaatataaacgccgcgcattatacgcatcaatgcgccagaaagtgagcattgcttgcaaattacggaatagaagaaattaaatgtagaagaattgcgcaattatagcgggctggcagaataccagcccgcaagatgacaaagctttaccttaaaggacagaacagactttacgcgagggtactaattcgcgccaactgctcgaaataatccgggaacgttttcgccgtacatttcggatcaaggatagtgaccggcgtcgccgataaggccaccagcgagaagcacatcgccatgcggtgatcgttgtaggtaccgatttcagcaaatttcagcgtctcaggcggcgtaatacgaatataatcttcgccctcttctacttcggcgcccactttacgcagttcagtggccatcgcgaacaggcggtcggtctctttcacccgccagttgtaaatattgcgcagcaccgtggtgcctttcgcgaacagcgccgcagtggcgatggtcattgccgcatccgggatatggttcatatccatatcgacagcattcagctcaccgtgggtacaggcgatgaaatcgtcgccccaggtaattgtcgcgcccattttttccagcacatcggcaaagcgaatgtcgccctgaacgctattgcggccgatcccggtcacttttaccgtaccgcctttaatcgcgccggcagcaaggaaatacgaggctgaagaggcatcaccttccaccagatagtcgcccggcgactgatactgctgcttggcgcgtacgacaaagcgctggtagttgtggttttcaacgtcaacgccaaaggttttcatcaggtgcagcgtgatgtcgatgtaaggtttggacaccaggtcgcctttaatcgcgatcgtcgtgtcctgcggcgccagcggcgcagtcatcagtaaagcggtaaggaactggctggagacgctgccatcaacttccacctggccgccgttgaaaccgccgcgcaggcgcagaggcggatagttttcctgctccagatactcaatttgcgcgcccccctggcgtaacgcatcgaccaggtggcctatcggtcgctctttcattcgcggttcgccggtcagcacaatatcgttgtcgccgaggcacaacgccgccgccagtgggcgcatcgccgtaccagcattaccgagaaacaactccagcgcgccgctggcctgaagcggaccgccgttgccggtgacttcacagcgagtacgatcggcggacagggtgtagtgaactcccagggcgttaagcgcattaagcatgtggcgaacatcatcgctgtccagcaaattggtcagcacggtggtgccgtgggctaatgccgccagcagcaaagcgcggttagagacactttttgacccgggtaggtttacggtgccatcaacgcgcgcaatgggttgtaacgtcagggattccatgaaactcgactctcaaaaaaacagaataaaaaccccgcagaccggccgcggggatgaaaataagcgctcagcaattagccgcgacgacgttcaaagtcctgcatgaagtcggtaagcgccttgacgccggccagcggcatcgcattgtatatagaagcacgcataccgcccaccacgcggtggcctttcagcgcatgcagaccagccgcaaaagattcttcaaggaacagtttgtccagcgcgctatccgccagttggaacggcacgttcatccgcgagcggttggccgcggcaacatcgttacgatagaaatcgctattatcaatcacgccatacagcaattcagccttctgctggttgattttatccatcgcagcgacgccgccctgctctttcagccatttaaataccagccccgccagataccaggcgaaggtcggcggcgtgttgaacattgaatcattggcgttcagcacggtgtaatcaaggatcgatgggcaggcgacgctggctttacccagcagatcttcacgcacgataaccagcgttaaccctgccgggccgatattcttctgcgcgccagcgtaaatcacgccatagcggctgacgtcaagctcatgcgatagaatactggaggagtaatccgcggtgacgaccacatcatcgccaaagtttggtgtttcgtggatagcgataccgtcgatggtttcattggggcagtagtgcaggtaagccgcgcccggcgtcaactgccattcgttcatcggcttaacggctcgcaggccgtcaacggtggttttcgcgtcgataacgttcggcgtgcagtatttttgcgcttcttttaccgcgctcgccgcccagtagccagcatccacataatctgctgttgttttgtcacccagcagatttaacgggatcccggcaaactggccgcgaccgccgccatgacagaacagcactttatagttggaagggatattaagcagatcgcggaaatcctgttctgccgtttcagccacctggataaactctttaccacggtggctgatttccattaccgacgtccctagaccgtgccagtcgcacagttcctgttgcgccagtttgagaacttctgccggcagcattgccgggcccgaactaaagttatagacctgagccatttcccctcaccacgttgctatattgtctgcacgcgaaccgtcgcgggcataagttattcctgtggctatcggttttatcattcagtgacacacaccgcaacgagtaaaactaagcggcccataaatgaggccatcgtcacacaaaagaatcaaccagcttgacgtcattaaaccgacataattgctgcaagagaatcgctttttagcctgcgttccgtcacccattccggattttgacccacggcataaatagttatccactacattcacaggtaacgatctcgccatagcgcaatccgtcaactcatttaatacttgaatattatcttaattcttcatgaattatgtttccgcgagagcatcgccatttaccgctgcatttccagatcattaaaatttttaagccagccgatgaagactggcattcatcacttttaaaggaatatttatgcgtgaattaacctataacgaaatgtctgatgtgagcggcggctttggcctgttatccattccggcagcaattggtttgctggtcagtatcccgacaattgtcatcggcgcgattaccgggccctttacgctgggggcaggcttcgcagtgatggcggcaggcatcgtcggtaccagtcttgctggcgccgctatgatcgttagcatttgtacgccaatcctgtaacttgctatggcatgtggagtttctccgcatgccatttatcgctcttctctttttatccattgccgcggctaacgacatagccacttaccggtaaaacccgtatcattgcccatcctgccaacaataaacgaattgctatgacccagacatttatccccggcaaagatgccgccctggaagattccatcgctcgcttccagcagaaactgctcgacctcggatttgatatcgaagaggcctcgtggctgaacccggtaccacacgtgtggtccgttcacattcgcgataaagagtgcgcgctgtgctttaccaatggtaaaggcgcgacgaaaaaggcggcgctggcttccgcgctgggcgaatatttcgaacgtctgtccaccaactacttcttcgcggacttctggttaggcgaaaccatcgccaacggtccatttgttcattatccgaacgaaaagtggttcccgttgaccgaagatgatgaagtaccggaaggcctgctggatgcccgcctgcgcgccttttacgatccggacgatcagctgaccgccagcatgctcgtggatttgcaatccggtaatgacgagcgcggcgtttgcggcctgccgtttacccgtcaatccgacggcgaaactgtttatattccgatgaatatcgtcggcaacctgtatgtctccaacggcatgtcagcgggcaataccccgaatgaagcgcgcgtacagggcttgtctgaagtctttgagcgtcacattaaaaaccgtatcatagcagagagtatcagcctgccggagatcccggctgaggtaatggcgcgctatccgggcgtcgttgaatctatcgctaaacttgaagctgaaggtttcccgatcttcgcttacgatggctcattgggcggcaaatacccggttatttgcgtggttctgtttaacccggctaacggcacctgcttcgcctctttcggcgcccatccggatttcggcgtggcgctggagcgtaccgtcaccgaactgctacagggccgcagcctgaaagacctcgacgtctttaccccgccgacctttgatgacgaagaagtcgccgagcacgccaacctggaaactcacttcattgattccagcggcctgatctcctgggatatgttcaaacaggatgccgactatccgtttgtagactggaatttctccggcacgactgaagaagagttcgccaccctgatggctatcttcaaagcagaagataaagaagtctatatcgccgactacgaacatctgagcgtctatgcctgccgaatcatcgttccagggatgtccgatatttatccggcggaagacctgtggcttgcaaacaacagcatgggcgcgcatctgcgcgacactattctctccctgccgggtagcgagtgggaaaaagaagattatctggcgcttattgagcaaatggacgacgaaggtcttgatgacttcacgcgcgtacgcgagctgttaggactggcaaccggcaaagacaacggctggtataccctgcgcatcggtgagctcaaagcgatgctggcgttggccggcggcgacctggatcaggcgttgatttggacggagtggaccatggaattcaatgcctccatcttcagccctgagcgcgccaactattatcgttgcctgcaaacgttgctgctgcttagccaggaagaagaacgccagccgctacagtatctgaatgccttcatccgtatgtatggcgcggatgcagtagaagccgcgagcgccgctctgagcggcgaagcgccgttctatggcctgcaggcggtcgatagcgatctgcacgctttcccggcgcatcaatctttactgaaggcctacgaaaagctacaacgtgcaaaagcggccttctgggccaaataatcctttataggcaaaaaataacgtacggagccgacagcggctccgttttcttatgatttgtgccaaaaccatgccattttgtagcccatgagttaactttaagtaaaaaacaatatttggtgatatttagattgttaattttaataaaaatactccattctaattaaccgtaatcattggtcactcatggaaattttcaacattatttataaatattaaaatttagttttttattaaaaatcaaaaagataaagcaataacaggctaattccacacgcgaaatgggcctatgactccggtaggatatgatctacatcaaattcccttctataatgctttgttagtatcacaccgccaacttatataaagagagagttagtgtgaaagctgacaacccttttgatcttttactccctgccgcgatggcgaaagtcgccgaagaagcaggtgtctataaagcgacgaaacatccgctgaagacgttttatctggcgattaccgccggtgtcttcatctccatcgcttttgtgttttatatcacggcgaccaccggtaccgccgcaatgccattcgggattgccaaacttatcggcggggtatgcttctcactaggtctgattctttgcgttatctgcggtgctgaccttttcacctctaccgtactgatcgtcgtggcgaaagccagcgggcgtattacctggggtcagctggcaaaaaactggcttaacgtctatgttggaaacctcatcggcgcactgctattcgtattattaatgtggttatccggcgagtatatgacggccaacggcggctggggcttaaatgttctgcaaactgcagaccacaaaatgcaccatacgtttattgaagccgtctgcctgggtatcctggcgaacctgatggtttgtctggctgtctggatgagttactccggccgcagtctgatggacaaagcgatgatcatggtgttgccggttgcgatgtttgtcgccagcggctttgaacacagcatcgctaatatgtttatgatcccgatgggtatcgtaattcgcaactttgcaagcccggaattctggaccgctatcggttcaactccggagagtttttctcacttaaccgttatgaacttcatcactgataacctgattccagtcactatcggaaacatcatcggcggtggtttgttggttgggttgacatactgggtcatttacctgcgtggcgacgatcatcattaatggttgtctcaggcagtaaataaaaaatccacttaagaaggtaggtgttacatgtccgagcttaatgaaaagttagccacagcctgggaaggttttgcgaaaggtgactggcagaacgaagtcaacgtacgtgactttatccagaaaaactacaccccatatgaaggtgacgaatccttcctggctggcgcaactgatgcgaccaccaagctgtgggacagcgtaatggaaggcgttaaacaggaaaaccgcactcacgcgcctgttgatttcgacacttccctcgcatccaccatcacttctcacgacgcgggctacatcgagaaagcgctcgagaaaatcgttggtctgcaaactgaagctccgctgaaacgtgcgattatcccgttcggcggtatcaaaatggttgaaggttcctgcaaagcgtacaatcgcgaactggacccgatgctgaaaaaaatcttcaccgagtaccgtaaaactcacaaccagggcgttttcgacgtatataccccggacatcctgcgctgccgtaaatccggcgtgctgaccggtctgccggatgcttacggccgtggtcgtatcatcggtgactatcgtcgcgttgcgctgtacggtatcgacttcctgatgaaagacaaattcgcccagttcaactcgctgcaggcgaaactggaaagcggcgaagatctggaagcaaccatccgtctgcgtgaagaaattgctgaacagcatcgcgcgctgggtcagatcaaagagatggcggctaaatatggctacgacatctccggtccggcgactaccgctcaggaagctattcagtggacctacttcggttacctggccgccgttaaatctcagaacggcgcggcaatgtccttcggtcgtacttccagcttcctggatatctacatcgaacgtgacctgcaggcgggtaaaatcaccgagcaagacgcgcaggaaatggttgaccacctggtcatgaaactgcgtatggttcgcttcctgcgtaccccggaatatgatgaactgttctccggcgacccgatttgggcaacggaatctatcggtggtatgggcgttgacggccgtactctggtaaccaaaaacagcttccgcttcctgaacaccctgtacaccatggggccgtctccggagccgaacatcactatcctgtggtctgaaaaactgccgctgagctttaagaaattcgccgctaaagtatccatcgatacctcttctctgcagtacgagaacgatgacctgatgcgcccggacttcaacaacgacgattacgctatcgcatgctgcgtaagcccgatgattgttggtaaacaaatgcagttcttcggcgctcgcgctaacctcgcgaaaaccatgctgtatgctatcaacggcggcgttgatgaaaaactgaaaatgcaggttggtccgaaatctgaaccgatcaaaggcgacgtcctgaacttcgacgaagttatggagcgcatggatcacttcatggactggctggctaaacagtacgtcaccgcgctgaacatcattcattacatgcacgacaagtacagctacgaagcctctctgatggcgctgcacgaccgtgacgttatccgcaccatggcgtgtggtatcgcaggtctgtccgttgctgctgactccctgtctgctatcaaatatgcgaaagttaaaccgattcgtgacgaagacggtctggctgttgacttcgaaatcgaaggcgaatatccgcagtttggtaacaacgatgctcgcgtcgatgacatggccgttgacctggttgaacgtttcatgaagaaaattcagaaactgcacacctaccgcaacgctatcccgactcagtccgttctgaccatcacctctaacgttgtgtatggtaagaaaaccggtaacaccccagatggtcgtcgcgctggcgcgccgttcggaccaggtgctaacccgatgcacggccgtgaccagaaaggcgctgtagcctctctgacttccgttgctaaactgccgtttgcttacgctaaagatggtatctcttacaccttctctatcgtgccgaacgcgctgggtaaagatgacgaagttcgtaagaccaacctggcgggcctgatggatggttacttccaccacgaagcgtccatcgaaggtggtcagcacctgaacgtgaacgtcatgaaccgcgaaatgctgctcgacgcgatggaaaacccggaaaaatatccgcagctgaccatccgtgtatctggctacgcagtacgttttaactccctgactaaagaacagcagcaggatgttattacccgtaccttcactcagaccatgtaattccctgtctgactgaaaaagcgtacaataaaggccccacatcagtggggcctttttaacacgtgattccctgccccagcctgctttgccagttatctatactttgggtacctgtcaaaacagacttaacacagccggtttgagctgtgcatcataggccctggagggccgaacccggagatatcaccgcaatgtcaactattggtcgtattcactcctttgaatcctgtggcaccgtcgatggcccaggcatccgctttattaccttcttccagggctgcctgatgcgctgcctttactgccataaccgcgacacctgggatacccatggcggtaaagaaatcaccgttgaagaattgatgaaagaagtggtgacctatcgccactttatgaatgcttccggcggtggcgtcaccgcctccggcggcgaggcgatcctgcaggctgaatttgtccgcgactggttccgcgcctgtaaaaaagaaggtatccacacctgcctggataccaacggcttcgtacgccgttacgatccggtgattgacgagctgctggaagtcaccgatctggtgatgcttgaccttaagcagatgaacgatgaaatccaccagaacctggtcggcgtttctaaccatcgtacgctggagttcgcacagtatctgtcgaagaaagggattaacgtgtggatccgctacgtggtggttcccggctggtctgatgatgacgattccgcacatcgtctgggtgagtttacccgcgatatgggtaacgtcgagaaaatcgaactcctgccctaccatgagctgggtaaacacaaatgggtggcaatgggcgaagagtacaaacttgacggcgtacacccaccgaagaaagagaccatggagcgggtaaaaggcatcctggagcaatatggccataaggtgatgtactaaaccggctgcgggccggaggtactctcaccacggcccgcaactataatagtatcaatcccgccgataacgcctcatcatgagcgcgataccgtctgcccgcagaaagattggttacgcgtgtgccaccggcgtcgggtgatgtccggctttgcgcagcagggtcagcagatagataaacgatacgctggcgatcatgataaacagcagattatccgagaagttctgcatcaacatcgccgtcagggtcggccccagcaggctgccgatggtatagctcatcagcagcgcctggttcatcgccaccagttgatggtgttcaaccttctcgcaggcccaggccatcgccaccggatacagagtaaaaccggatgcgccgagcacaaaaagcgctggcgccattgccgcctggctcagcatcgccagacagcccagaatcaccacaaagacctgcacgcgcagcaccagcaggcggccatagcggtcagccagacgcccgaccggccactgcccgagaatacctgcgctaaccatcaccgccatccagaaaccaatacccgaatcgctgacaccttgatgatttagccacagcggcatcaggccgtacagtgaaccaagcacgatgccggagatgatgcagccattcacaccgtgacgtgcctgacgcagtttcagcatcggccagatacgtaccgtttcatgcggctcgtcggcctggctcataatacgtgtaaacatcagcggcaggatcgccgccagcgccaggccggtaacccacggcagcacgctcattaaatcggtcggtaatttgctgaccatcagttggcccaatacagtaccgatgtaatagaccatcatgtacgccgccagcagtcgaccgcggctgcgggaagtaccgctgcacaccagtgcgctttcgaccaccacccaaatcattgcacagcccacgccggcgataaaacgccagctcagccatgtccagaagccgagtgtaatacccagaccaacgcagccgacagcaaaaattaatgacgccagataatagctacggttaaaccccagacgtttaatgacccagccggcaaatagtgttcccaccagattaccggtgaaataagaagagccgaccatcccaacctgccaggttggcatattttcatgggcgagccacagcgggacaagcgtatttaaaaccgcgattgccagcgtcaacagaagcaggccacagagcaacatttgcactgggcgagtgtagatggtcatgggtattaaccgtgaggaagttcagatttcgtgcgcatcatgccactgctgtaaacattgtcaatccgccagaattcaggcctgacgcggttttcagggcaacgatagaagttttttatccagcggaacggcaacggaattattctttatattattccattgtttttattaatttattggaaaactatagtgggaatatcagtagaaaaatttcatgaatcaaccgcattttttaatcacgccggaataggcttccggcgtgatttcacgttattaactggcgatagccataccgacggtcatatgcagaccatagaatacgccgcggccaatcatctcgccgaccagcaccagcacaaacgccaaccccagcagcggcaatgcgggttgataacctttaagctgcggtacaatccagcagaccaacgccagaactaacgcgaccgtccgccatgccattaaggaaccataattcggcaccagcgccgaggcctgttggattgaactatggatcgtcgccaactcgctgccctgaatcagcgcgacggtcacgctaatcactaacgccaccagcatgatcaccggcaataaacgcatcgcccaaccgtccacacccgcgacacgcagcagcaggtaacccaacagcggcccgccgataaacagggtcaggaagaagttgagcggtgtccagatggtgtaccaggtgggtacggtatcgatagtgttatatacgcggatcatcatccagacaaagatgacgccgaggatcatggtgacgaccagccacagattacgcagcccggacggtaatttatttaccaccgccagcagccagccaatcccgccgacggcgaagaaaagcgcgccgctggctatttcattgcttaacgaggatgcgccaacgcggttcagcgaattaaacgcgcgcattggcgaaccaaggtgcatggtggaggcgataaaaccgatccccattaacacccatagcccaaacatgctcattatcacccgccgctgctgctcgcgcgaaagttcgcccttcatcaacgccagcgcgagaacgataaagcccccggcgacgcattgaccgaagaccgtgaaaatcatcagcggccattcatgccatccatttcccattttagacctccttcggattggccagatagccggtggtatcgccgcacggacggctgttggcgtttggttttatcacaatgctcggcctggtgaagtgcgccgacggcagcggcgccacggcggccagttggccgtgcttttcacgcagttcggcaatcggcccgaagtccagcgcccgcagcgggcaggactcgacgcaaatcggcttcttgccttgtgcgacgcgttcgtgacagccgtcgcatttggtcatatgccctttagcggcgttgtactgcggcgcgccgtacgggcaggccatatggcagtagcgacagccaatgcacacctcttcattgaccaccacaaaaccatcttcgcgcttgtgcatcgccccgctcgggcagaccttggtgcacgccgggtcttcgcagtggttacaggcgatggaaaggtagtaggcaaaaacgttctgattccagacgccgttgtcctcctgccagtcgccgccggcatactcgtagatacgacggaagctgacgtccggcgtcaggttcttgtagtctttacaggccagctcgcaggttttgcaaccggtgcaacgggcggaatcgataaaaaatccatactgagttgtcatcggttactccttacagcttttcaacctggacgaggttggtatgcgatgggttgcctttcgccaacggcgacggacgttgagtcgtcagcacgttaatgctgccggcctgatccacgcgtgaagcgtccgggttataccaggcgccctcgcccagcgcgacgacgcccggcatcatacgcggcgtcactttcgcttcgatatggacttcgccgcggtcgttgaaaatacgaatgcgatcgccattgacgatgccgcgcgtcttcgcatcgatcggattgatccacatctcctgacggcaggctgcctgcaggacatcaacgttgccataagttgagtggacgcgagacttgtagtggaatcccgtcagctgtaacggatatttggcagtcaacggatcgttgtaattttcaaacccaggagtgtagatcggcagcggatcgatgacatcgccttccggcagctcccaggtcgcggcgattttagcgagctcctgggaatagatctcgattttgcccgatggcgtggtcagcgggttggcctgcggatcgtcacggaaggctttatacgccacatgatgaccttgcgggtcacgctgcttgaagatgccctgctggcggaaagtatcgaaatccggcagttcgggaatcgctttccgcgactgctcatacaaatagcgcatccagccttcctgagtgcggccttcggtaaatttctccgccacccccatgcgtttcgccaactcggtggtcatctcatagatggttttgcattcgaaacgcggtttgattgcctggtcggcaaagatgacataggacatattgccgcaggaggcgtccagcgcgaagtccatctgctcagaggcggtacagtccggcagcagaatatcggcgtatttcgcagacgacgtcatgtggcagtcgatgaccacgatcatttcgcacttcttatcgtcctgcaggatttcgtgggtacggttgatctcggagtgctggttgataaggcagttacccgcgtagttccagatcatcttgatcggcacgtcgagcttatctttgccgcgtacgccatcacgcagcgcggtcatttccggaccacgttcaatcgcatcggtccacataaacatagagatgctggtctcaaccggattttccagcgtcggcatacgttcgaaaggtaggctatatgaaccttcacgtgcgccgctattgccgccgttaatccctacgttgccggtcagaatggcgagcatggagatggcgcgggtggcgatttcaccgttggcgtgacgctgaggtccccacccctggctgatatacgccggtttcgccgtcgctatctcgcgagccagcttcacaatgcgctcacgcgggatcccggtaatggtggatgcccactccggcgttttagcgataccgtcggaaccctgaccaaggatgtaagctttataatgtccattcgccggcgcatcggcaggcagggttttctcgtcgtagccgacgcagtatttatcgaggaagggctgatcgaccagattttcagtaatcatcacccaagccagcgctgaaataagcgccgcgtcggttcccggacgaatcgggatccattcatcttcacgcccggcgccggtgtcggtataacgcggatcgataatgatcatgcgggcattggatttctgccgcgcctgttcaaggtagtaagtcaccccgccgccgctcatgcgcgtttcgccagggttattgccaaacagcaccaccaactgactgttttcgatatccgacgggctattgccatcggcccaaccgccataggtgtaattcaaaccagccgcaatctgcgccgatgaatagtcgccataatgattgagatagccgccgcagcagttcatcagacgagcaatcagcgtttttcctggcggccaggaacgagtcagagtcccgccgagcgtaccggttccgtagttcagatagatagattcgttgccataatctttaatcagacgctgcatattgctggcgatagtgtcgaacgcctcttcccagctaatttgttcaaattttccttcaccgcgtttgccgacgcgcttcatcggatatttcagccggtcagggttatagacccgacggcgcatagagcggcctcgcagacaggcgcgaacctgatgcagaccgtcgtagttatcatcgccggtattatcggtttctacgtacttaatcgcaccatcaaccacgtgcatgcgcagcggacagcggctgccgcagtttacggtgcaggcgctccagaccactttctcactcactggcgccagcgtatcagcggcgtgcgcaatacgcgtgaagggcaaggtcaatgcgttgctggccatcgccaggccgcctatcgccgtggttttcattaaaccacgtcggctaacttcggcagccagtaaagcatcgggggctttgattttcatagatactcgctttggttgctcacaataagctgacaatcgttatataattttatatatatcggattttattggctttttatgctgtattaatccaaagggagtatcaccggatttactgaggggattattgcccggtatcaataaggatataaaaaaagcgcccgcaggcgcttttaaggaaagagcagaaaagattaaccgatatattcgaggccgcgcatatacgggcgcaggacttccgggatctcgatacggccatcggcctgctgatagttttccatcaccgcaaccagcgtacggccaaccgccagaccagaaccattcagggtatgaacgagacgagtctttttgtcggacttgctgcggcaacgcgcctgcatacgacgtgcctggaaatcccagacgttggagcaggaagaaatttcgcgataggtatcctgcgccggaacccacacttcgaggtcataggttttacaggcgctaaagcccatatcgccggaacacagcgctaccttacggtacggcagacccagcagttgcagaaccttctcagcgtggccggtcatctcttccagcgccgccatggagtcttccggacgtacgatctgcaccatttcaactttgtcgaactggtgcatacggatcagaccgcgggtatcacgaccatacgaacccgcttcagaacggaagcacggagtatgggcggtcattttaatcggcagatcgtcttcgtcgatgatttcgtcgcggaccaggttggtcagcggcacttcggcggtcggaatcaacgcatagttgctgctatcggcttcttcttccagcggacgagtatggaacaggtcgccggcgaatttcggcaactggccagtaccatacagcgtgtcctggttcaccagataaggaacatagttctcgctatagccgtgctgttcggtgtgcagatccagcataaactgcgccagcgcgcggtgcaggcgagccagctggcctttcatcaccacgaaacgggaaccggttagcttaacggcggcggcgaagtccagccccccgtgcatttcacccagcgtaacgtggtcgcgcacctcgaaatcgaactgacgcggcgtaccccagcggctgacttcaacgttgtcgttttcgtcgcggccaaccggcacgtcatcgtgaggaatattcgggatcgccagcgcgatatcgcgaatttccgccagcagcgtttccagctcggactttgcggcatccagctgttcgccaagcttgttcacttccaggcgtaatggctcgatatcttccccgcgcgctttcgcctggccaatggatttcgatcgggagttacgctccgcctgcaggttttcggtttgaacctgcagaactttacgacgctcttcaagagcgcgcagtttatctacatccagcttaaagccccggcgtgccagtttttctgcgactgcgtctggctcggtacgcagcagattgggatcgagcatgcttatcctgtgcttatcgaatttaaataggaaaaatggccgcaaactacggccacggaaatagaggtaataaccttaccgcaacgccacaattagcggtagcgttttatctggctattttgatccagttcggcaagccaggcgagcttttcagcgattttgccctcgagccccctgtttgttggctgataatagcgcgtttgcgccatttcctgcgggaaatactgctcgccagcggcgtaggcgttaggttcatcgtgcgcgtagcggtactcctgaccatagcccatttctttcatgagtttggtcggcgcattgcgtaaatgtaccggcacgtcgtaatcagggcgatcgcgggcatcggccagcgcggccttaaaggcggtgtagaccgcgttgctcttcggcgcacaggccagataaacaatcgcctgagcgatagcccgctcaccttccgccggcccaacgcgagtaaaacaatcccacgcggaaatggctacctgcatggcgcgaggatcggcgttgccgacatcctcagacgcgatagccagacaacggcgagcaacatacaacggatcgccgcctgcggtaataatccgtgcgtaccagtacagcgccgcatccggcgcgctaccgcgcacggacttatgtaacgcggatataagatcgtaaaaacggtcgcctttattatcaaaacgcgcgctacgctcgccggcaatttcggtaagcagttccgctttcagcactcgcttgcctgaatcgtcgttttcagccatatcggccatcatttccagcgtgttcaacgcccggcgcgcatcgccgttgaccagctcggcaatcgctttgcgggtttcatccggcaggataatatcttgcccaccgtagcctcgcgctttatcgctcatcgcctgattgagcacctgctcgatatcgtccgtggtcagtgatttgagtaaatagacccgggcgcgggagagcaaagcggaattaagctcgaatgacgggttttcggtcgtcgcgccaataaaagtaatagtgccgtcttcgatgtgcggcagaaaggcgtcctgctggcttttattgaaacgatgcacttcatcaacaaacaggatagtgcgtcgaccagcgttgcgattttgccgcgcacgttctatagcttcgcggatctctttgacgccagatgtaacagccgagatacgctcgacatcagcattggcgtagcgagcgatcacttccgcaagggtagttttacccgtgcccggcggcccccacaggatcatcgagtgcagatgccctgcctcaatcgcccgcggcagcggtttacccggcgccagcaggtgctgctggccaatgtactgcgctaaattttctggccgcatacgggcggccagaggttgaaatgcattatcggaaaaatcgagcgaaaagttgctcacattcgcctctacttacgttgatcgtccaccgtcaccccttgcggcggcgtaaaagtgaacttagatgcgtcgacggcgccattctgctgcgacttcagctgatagctgctgcgctggtcgtcttgctcaacggcgctgaactgatggatagtaccgtcacggcccacattgattgtgaactgcttgaggttgccgttaccgcttttcggcgtcagcacaaaatcatcgccgttttgtttgatgttgtattgctgccagtccgctgactggttgcgggcgatcagcatgaacggcgtgttactggtcgcgtttttcagccaggtcgcggttgcctgctccacaaacggattatagaaccacagcgttttcccatccgataccagaatactttcatccggctgggtcatatgccagttgaacagattcgggcgtttcacccacaaatcgccctgcccgtcctgcacggcattaccgcttgcgtcggtcactttctgagtgaagctggcatggaagctgctgactttatccagacggctttttaagtcgccggcagcgtctgcccaaacctggcttaccacgaagccagacaataatgcacaggtgatggcaagtttcttcattgttgatccttattgtgcgtcactcccgacgcgggggcctgttctgtccctactgtagagccgttgagagcaacggaatagcagaacaggctgattttgcgcttatttaccgaactttgcacttactcgaagggaggcggtgccaggacttcacggttaccgttatggccttgctcgctgacgatcccctgagcttccatctgctcaatgatacgcgccgcgcggttataaccgatacggaactgacgctgcacccccgagatcgaggctttgcgcttctcggttacgaagttgaccgcctgatcgaacagcggatccagctcttccccgccatcaaagccgccaccaccgccttcgctttcgctatcagaggtaataccgtcaacatactgcggacgaccgcgcgctttccagtcctgcaccacggcgtgtacttcctggtcacggacaaacgcgccatggacgcgaaccggcatcgtggagttcggcccggaatagagcatatcccccatgcccagcagcgattctgcgcccccctggtcaaggatggtacgcgagtcaatcttgctcgatacggtgaaggcgatacgcgtcggaatgttggccttgataagaccggtaatcacgtcaaccgacggacgctgggtcgccagcaccaggtgaatgcccgccgcgcgcgctttctgcgccagacgcgcaatcagttcttccaccttcttaccgacggtcatcatcagatcggcgaattcatccaccagcaccacgatgtacggcagtttttccagcaccggatgcacggcgtccatactgtcgcccggtttccagtaaggatccgggatcgggcgtcccatgcgtgcggcctcagcgatcttctcgttgtagcccgccagattacgcacgcccagcgccgacatcagcttataacggcgctccatttcattgacgctccagcgcagcgcattggcggcgtctttcatgtcggtgaccacttccgtcagcagatgcgggataccttcgtacaccgacagctcaagcattttcgggtcgatcatgatgaaacgaacgtcttccggctgcgccttatagagcatgctggaggatcatggcgttcacgccgacggatttacccgaaccagtggtaccgggaacccacagatgcggcatttttcgccagatcggccaccaccggatccccggcgatatctttgccccagcaccacggtaagcggcgatgggttctcgcggaatttcggacaatcgagcacttcgcgcaggtatacggtctggcgttttttgttcggtaattccaggccaacgtaaggtttacccggaataacttccaccacacgcaccgccacggtcgacagcgaacgcgcaaggtcgcgcgacaggttagagatacgcgcggccttcacccccggcgcgaggttcagctcgaaacgagtgatcaccggacccggcgagtagttcaccacatccgctttaatgcggaaatcggcgagacgcgcttcaaccagacgcgccatctgctcaagcgcaaaggtatcaacaggttcaacttcactcggcggcggcgtcaagagatccagcgacggcagcggcgttgttggtctttgcagtggacggctgtcgccattacgcatcagtagcggatgaataaggctatcctgaggcgacggcgcgggctgctgataagactgctgagcaaccggctgttgttgctgcattggctgctgcgcaggctggtaagcctgcggctgcggcgctaccggctgatggtgtacgggcggctgcgcaggttgataaccctgctgtggcgcggctgccggttgttgataatgctgagccggttgctggggctgcacttccggcgtcggcgtaaacaacggctcgcttggaccatcattgaccagcgttttcatcggcgagaactcatagtccgccggtgagaagggattggctcccggcggctgctcgctggcatagcgctgctgctgggtcgcggcaaactggcgcgccagttcggcttcagcggcagcgtcttcgtcctgctcatcgctttcggattcccaggactcgccatagcgctgttgctgggtagcggcaaactgacgcgccagctcgtcctgttccagcgcatcggcttcttcgtcactcagcggctcattatcgtaatgatgttcaagctcggcccgacgcgcgcgctcttcagcaatacgctgagacggcagcttaatgccataggaagcaagctcccgacgcgtcggcacacggacgcgattcggacgcggcaatttcggaccaatgccttcttttacctgtacccgcgggccgctggatgccgggctgaaaactggcgctgcgtcagcggcggttgacgccactgaggcggctgcggctgcgctgccagaagtggtggcctgatgaacgcctgcagcgacggccgtcacggcggcggcatcaactgacggtttggatggggcagccggggtggttatcggtttggtcgccaccgggctcgctggttcagggattggctggtaccaggattccagcaactcacgctcgcgcgcgcgcttctcttcgacttcctcgaagtagtacatcggcgggcgtttagtttcttcctgaggagcctcaggctcagcggctggcgccggttcctgatgataaacaggttgttgaacagccggttcaggctggtatatcggctgctgtgggtgcgcggcttccggctggtaaaccggcggctgctgcggcgcatactgaggctgatacgccggctgctgtggatgcgcggcttccggctgataaaccggcggctgctgcggcgcatactcaggctgatacgccggctgctgtggatgcgcggcttccggctggtaaaccggctgctgcggcgcatactcaggctgatacaccggttgttgcaggtgtgcggcttccggctgataaaccggctgctgctgcggcgcgtattcaggctgatacaccggctgctgtggatgcgcggcttccggctggtaaaccggcggctgctgtggcgcatactcaggctgatacgccggctgctgaggatgcgcggcttccggttgataaaccggcggctgctgcggcgcatattcaggctgatacaccggtggttgcaggtgagcggcctccggttggtatgcctgccctgtcccctgctccgcccatgcctgcggcgcaacgacagcggcggaggcggcgccgatcgggtcggccaccgtatggccattcagtagcggatcgtaagggtctaaatcgccaggacgcgcggcgctggcgcctgagaacaggacatcatccgcagcgacaggcgcgccgctggcgctgtattgtactgcttccgcatcatccatacgtttaccggagaacagcgcggcatcggttttacgccccatcgggttggcgaacttttccgccagacgcttacgacgcgctagcgcgctgcgtaagatgcgggcgcgacgcgattcccgcggctgtgcggtatcgtcgtcttcttcatcttcatattcatcatcttcatattccccttcatcaacccaggtatcgtcccgacgggtacgattactggcaaaggtcagaatagaaaggattgcgccgccgagtttctcggcaatgctgacccatgaccagccggtaaacagtgttaaacccgcggcccagatacagagcaaggcgatagtgccgccgctgctgtgcagcaagggttgtaaggtggtgctaagcaggctgccaatgacgccgccggaggcaaagtaccagatatcgtcggcgttaattgccgccaggccgcaggaggtgaggatcagcgccagcgcgccgatcaagcgcaacgaaacagcgaagtaatcgacatactcgtcattttcctgatgacgccatgcaaaccagcagccgccgatgataatcacggggatggtgtaggccattacgccaaagatgaaaaataacgtatccgccagccacgcgccgggcatgccgcccagattatggataggctcatgccaggcggtctgtgaccaactgggatcggatggattaaagctcagtaatgccgccatcagccagatggcaaaaagagagcaaaggatgagtaacgcctcaagaacgcggcgcccgctgcttagcttcgttagtttgacttctttgtcttcggtgtattcctggctcaagaaaggctctccaggtatcaggcaatttcctgcctgctgctaaaacggacaacagcgccgggtctccccggcactgttgctgtatggattaacaggagtgtaatcaaactacgtcgattttgcacctgttccgtgttagcgcgtcttgattaccagacgattactctgcttgacttcttccataaccacgtaggtacgggtgtcgtttacgcccggcaggcgcagcagggtttcgcccagcaatttacgatacgctgacatgtccggtacgcgggttttcaacagatagtcaaaatcaccggataccaagtgacactcttgaatttcttcaagtttttgtactgcggcgttaaattgctcaaacacatctggcgcaccacgattcagagtaatctcaacaaataccagaagtgatgcatccagataatgcgggttgagcagcgccgtatagccctgaataaaaccctgtctttccagtcgacgcacacgctcaaggcaaggcgtcggagaaagtcccacccgtttggaaagctcgacgttggaaatacgcccgtctttttgcagttcattcagaatgttacgatcgatgcggtcgagatctttgccagggcgtttcttgctatctaccattattattgtctctctgtattccttccctactcctgttctgactctgcgccttcactgccagagcccatcccgttattacccgtacgacgttgagtaacccaggggtacgtgagaagcccgttgcctgatggcagtcaccgacatcacgcatggcgtctgtccacaccatgcgtagatttcgctgacccggataaaaatggcatttgcgtgcatgaacattcgccacacgcgaaacactgcttttcttcttccatgaatgttttcgcaaaagcacaggggattgtcaaagcaaaacatcgatttttagtacaagatgccagatattcatcatcaaccccctctgaatctcatgttttcatcttataatcagggcgctaacagtagaattaattatattttccgctcgttaaatcgccaatccatcggcgggttctattgcacatatcgttaacaaaatcgctacgctctttttttacgcccgcaaattccctacaatccagcccaatgtatgccaataaaatatggggatctcatgggcacagccaaacacagtaaactgcttattctaggttctggacctgcaggatataccgcggcggtctatgctgcgcgcgcaaacctgcagccggtgctgatcaccggcatggaaaaaggcggtcagctgaccaccaccactgaagtggaaaactggccaggcgacccaaacgatctgaccggtccgctgctcatggaacgcatgcacgagcatgccaccaagttcgaaactgaaattattttcgaccatatcagcagcgtcgatctgcaaaaccgtccgttccgcctggtcggcgacagcggcgagtacacctgtgacgcgctgattatcgctaccggcgcttccgcccgttatctgggtctgccttctgaagaagctttcaaaggacgcggcgtctctgcctgcgccacctgcgacggtttcttctatcgtaaccagaaagtcgcggtcatcggcggcggcaacacggcggttgaagaagcgctgtatctgtccaacatcgctgctgaagtgcatctgatccaccgtcgcgacaccttccgtgcggaaaaaatcctgatcaagcgcctgatggataaagtggaaagcggcaatatcgtgctgcacaccgatcgcaccctggaagaagtcaccggcgaccagatgggcgtcagcgggctgcgtctgcgcgataccaaaaatagcgataacgttgagacgctggacgtcgccggtctgtttgtcgccattggacacagcccgaacaccgctatctttgaaggtcagttagcgctggaaaacggttatatcaaagtacaatccggcatccatggcaacgccacgcaaaccagtatccctggcgtgttcgccgcgggcgacgtgatggaccatatctaccgtcaggcgattacctccgccggcaccggctgtatggcggcgctggacgcggaacgctatctggatggtttagctgacgcttgcaaataatctttacaagtcagtaacaaaggtaaagaaggcgacgaaaagtcgcctttatttttgccccgttgtaacattgccgtgcccaaaaatctcataacgacacctgctaagcgcgcaatgaataaaacccgtcaacaagagttaacccgctggttaaaagaaaaaagcattatctcccgtcgctggttgatgatttctcgcctgctgggcgtcgtgagcggtctattgatcgtcgctcaggcgtggttcctggcgcgtatacttcaccgaatgataatggaaaatatcccggcgacggcgctgctgctgccgtttaccttgctggcgctggtgctgatcctgcgcgcctgggtggtgtggctacgcgaacgcgtcggcttccacgccggccagcatatccgttatgaaattcgccgccaggtgctggaccgccttcagcaggcgggcccggcctggattcagggaaaacccgccggcagttgggcgacgctcatccttgagcaaatcgacgatatgcatgattactacgcgcgctatctgccgcagatgacgctggccgcctgcgtgccgctgctgattgttatcactatcttccccagcaactgggcagccgcgctaattttactcggcaccgccccgctgatcccgctctttatggcgctggtcgggatgggcgccgccgatgctaaccggcgcaatttccttgcgctcggtcgcctcagcggtcacttcctcgaccgtctgcgcggcatggagacgctgcgtctgttcaaccgcggcgaggcggaaattaacaatatccgcgatgcgtcgcaggatttccgccagcggacgatggaagtcctgcgtctggcctttctctcctccggcgtgctggagttctttacctcgctctctatcgcgctggtggcggtctatttcggtttttcctacctcggcgagctcgacttcggccactacggcgtcggcgtcacgctgatgtccggttttttaaccctgattctggccccggagtttttccagccgctacgtgatttaggcacattttaccatgccaaggcgcaggccattggcgcggcggatagcctgaagacttttatggaaacgccgctggcgcaggctgaacggggcgagaaaacgctaagcgatcatgaactgattcgcctcgaagcccgcgatctgatggtgaaatcgccggaaggcaaaacgctggcaggcccgctgagtttcaccctgaacgctggcgagcgcgtggtcctggtcggccagagcggttccggtaaaagctcgctgctgaatacgctgacaggctttcttccctatgaaggttcgctacaggttaacggcgtggagctgcgcgatctcgatgatgaacgctggcgccggctaattagctgggtcggtcaaaacccgcaactgcccgccgccacgctgcgtgaaaacgtgctgctagcgtggccagaagccacggaagcgcaactgcagctagccctggataaggcctgggtcagcgaatttatttcccaattgccacaaggtattaataccccgttaggcgatcaggctggcggcctctcggtcggccaggctcagcgtattgccgttgcgcgcgcgctgctggtgccgtgccgcctgttgctgcttgatgaaccagcggccagccttgacgctcacagcgaacagcgtgtgatgcaggcgctatctaacgcttctacccagcagaccacgctgatggttactcaccaactggcaggactggccgagtgggatgctatctgggtaatgcaggatggtcagattgtcgagcaaggcggctatgcgcagctttctgccgctggaggcgcgtttgcctcactgttagcccatcgccaggaggaaatttaaatgcgcgcactgttaccctatctggcgctatacaaacgccacaaatggctgctgaccctcggcgtggtgctggctatcgtcacgctgctggcaagtatcgggctattaacgctttccggctggttcctgtcggcctctgcggtggtcggggtcgccgggatttacagttttaactacatgctgcctgccgcaggcgttcgcggcgcggcaattattcgtacggccggccgctactttgagcgtctggtgagccacgatgccactttccgggtattgcagcacctgcgcgtcgccacgtttagcaaactactgccgctctcccctgccgggctggcgcgttttcgtcagggtgagctgctcaaccgcatcgtggcagatgtcgatacgctggatcacctctatttgcgcgtgatctcgccgctggttggtgcactggtggtcatcctggtggtgaccatcggcttaagcgtactcgatgtcaccctggcgctaacgcttggcggaattatgctggcgacgctactcctgctgccaccgctgttttaccgtgccggtaagccgaccggggagcagatcacccagctccgcgggcagtatcgccagcaactcacctcctggctacaggggcaagccgagttaatgctgtttaatgccagcgatcgctaccgtaaacagatggaaaaaacggaacagcgctggcaggaggcgcagcgccgccaggctgagctcaccgccctgtcgcaggcgctgatgctgctgattggcggcatcgcagtgatcgccatgctgtggatggcctccgaaggcgttggcggtaataaccagccgggggcgctgatcgccctcttcgtgttctgcgccttagcggcatttgaagcgctggcgccggtcaccggcgccttccagcatctcggccaggtcatcgcgtccgcgcgtcgcattacgcagattaccgagcagcagcccgaggtgacgtttagccagcagacaccgcaaagcttctcccaggtagcgcttaccctgaatgaggtaaccttcagctacccgcagcagtcggccccggcgctaaaagatatttctctgcaggtcgcggcaggcgagcatatcgccattcttggccgtaccggctgcggtaaatcgactctgctgcagctattgacccgcgcctgggatccggccaacggtcagattcagctaaatggccagccacttagcgtgctgtctgaaacgaccctgcgccaggcgatgagcgtcgtgccgcagcgggtgcatctcttcagcgcgacgctgcgcgataatctgctgctcgccgcgccgcaggtcagcgacgccaggcttgccgaaatcctggcgcgagtcggcctggagaaattgctggaagatagtggcctggatagctggcttggcgaaggcggacgtcagctttccggcggcgaattacgtcgactggctatcgcccgcgcgctattgcacgatgcgccgttaatgctacttgatgaacccaccgaaggcctggatgcaacaacggaaagccagatccttgatttacttagtgaagtgatgcgcgataaaaccgtgttgatggtcactcaccgtctgcgcgggctggcgcgttttaatcagataatagtcatggacaacggccaaattattgagcaaggtagtcacgcagagctgctggcgaaacagggccgttattaccagttcaagcaacgtctgtaagctattattgtcaacaattgctggtgcgtattgaggtcaaaaatgcgtctggttcagctctctcgtgactctatcgccttcccttccccggaaggcgctctgcgtgaaccaaatggcctgctggcgctgggtggcgatctcagcccagcccgtttgttgatggcctatcagcgcggtatctttccatggttttctcccggcgaccctattttatggtggtcgcccgatccacgcgccgtactgtggccggagcaattccactatagccgtagcatgaaacgtttccatcaacgttcgccctatcgggtgacgctcaatcacgccttcggccaggttatcgagggctgcgccagccatcgcgatgaaggcacctggatcacccatggtatcgttcaggcctatcaccagttacatgaactcggtcatgctcactccatcgaagtatgggatgaggataggctggtcggcggcatgtatggcgtggcgcagggagcgctgttttgcggcgagtcgatgttcagccgggcggaaaatgcctccaaaaccgcgctaatgatcttctgtcaggcttttgcccagggcggtggcagattaattgactgtcaggttcttaatgcgcataccgcctctttaggagcgattgaaatcccgcgccgcgattatctcgattacctttccgtattacgcacctatcgcttaccggagcgattttgggtaccaagggtgctatttaccggtaatggataaatgttttcagcacatttcttagcgcggtggtataattgcgcggtagagtagcttctgcctgttgccccgccgccgtttgggaatattaagagtcagataacgcccatcgttctgtcactgccctttacgtttgcgcctgtcatgtggttttaccgcgtgtattccgggcaatgcgccaaaactacttcggcgatttatacccgtcatgttttaagctgcaggcgctggctgcgcgcaattattcaccgccagcctgcgacgcgaactgttttgggtatacgtaaaactttacatacttgctgaacttcggcattatcttgccggttcaaaactacggtagtgataccccagaggactagatggccaaagaagacaatattgaaatgcagggcaccgtacttgaaacgttgcctaacactatgttccgcgtagaactggaaaacggtcacgtggtaactgcgcatatttccggtaaaatgcgtaaaaactacatccgcattctgacgggcgacaaagtgactgttgagctgaccccgtacgacctgagcaaaggccgcattgtcttccgtagtcgctaattgtttccgccgctaaggcgtcagatgctgaaggccgggctcctgcccggtcttttcatttcaacttcccgcacgcaggctgagttttccggcgcttttaccaacgccagggtgtcgttttgccctttttcgcgatctacgcgccgagtttaacgataaactcccgtcatatccggacatttgacctgagcgataaaaaaagaccgggctgtcaccaacccggtctttatcactgaactattcagaatttattaatgcgccgcttccggtttgtgcttctgcgcgctgtggaagccgtaggtcagcacattgttggctttatccaactcaacggtaacctggccgccatccaccagcgaaccaaacagcagctcgtttgccagcggtttcttcaggttgtcctgaatcacccgcgccattggacgcgcgcccattgcccggtcatagcccttctcagccagccagtcacgcgcttcctgactcacttcaagcgatacgcctttctgatccaactgtacctgcagttcgacgataaacttatcgactacctgatggatcacggtggtagagaggtgatcgaaccagatgatgttgtcgagacggttacggaactccggcgtaaagatctttttgatctcttccatcgcatcggtgctgttatcctgctgaataagaccaatcgatttacgctcggtttcacgcaccccggcgttggtggtcatcaccagcaccacgttgcggaagtccgctttacggccgttgttatcggtcagcgtaccgttatccatcacctgcagcaggatattgaagacatccggatgcgctttttcgatctcatcaagcagcagtaccgcgtgcggatgtttgataaccgcatcggtcaacagcccgccctgatcgaaaccgacgtatcccggaggagcgccaatcaaacggctgacggtatgacgttccatatactcggacatatcaaaccgcagcagttcaatacccagcgctttcgccagctgcacggtgacttcagttttcccaaccccggtcggcccggcgaacaggaaggacccaaccggtttatgctcatgtccaagcccggcacgcgccattttgatggcttcggtcagcgcttcaatcgctttatcctgaccaaagaccagcattttcaggcggtctccaaggtttttcagcgtatcgcgatcgctgcgggagacgctcttctccggaatacgcgcgatgcgcgcaaccacggattcgatatccgccacattgaccgttttcttacgcttgctgaccggcatcagccgcgcccgcgcgcccgcttcgtcgatcacgtcaatcgccttatccggcagatggcgatcgttgatgtatttcaccgccagctcgaccgccgcacgcaccgctttggcggtataacgcacatcgtggtgcgcttcatacttcggtttcaggccgttgatgatctgcaccgtctcttcgacagaaggctcggtcacgtcgattttctggaaacgacgcgctaaggcacgatctttttcgaagatgttgctgaactcctggtaagtcgtggagccaatcaccctgatcttgccgccggaaagcagcggtttaatcaggttagccgcatcaacctggccgccggaggccgcccctgcgccgatgatggtatggatctcatcgataaacaggatgctattggtatcctgttcaagctgtttcagcagcgctttaaagcgtttttcaaaatcgccgcgatatttggttcctgccagcagcgaaccgatatccagcgagtaaatagtgcaatccgccatcacttccggcacgtcgccctggacgatacgccaggcgagcccttccgcaatcgcggtcttgccgacgccggattctcccaccagcagcgggttgttcttacggcggcggcacaatacctgaatagcacgctccagctctttatcacggccgatcagcggatcgataccgcctacgcgcgcaagctggttgagattggtggtgaagttttccatacgatcctccccgcctgcttgctcttcgttacccggctggctcgcattgttttccgaaggctggctgggctcgtctttgcgcgtgccgtgagagatgaaattcaccacatcaaggcggctgacttcatgtttacgcagcagataggcggcctgcgactcctgctcgctgaaaatcgcgaccagtacgttagcgccggtcacttcgctgcgaccggaggattggacgtggaaaaccgcacgctgcagcacgcgctgaaagcttagcgtcggctgggtgtctcgctcttcttccgtagccggaaggacgggagtggtctgttcgatgaaggcttcaagttcctgacgcaaagcgaccaggtccacggaacaggcttccagcgcttcgcgtgccgaggggttgctgagcaaagccagcaacaagtgctcgacggtcataaattcatgacggtgctcgcgcgctctggcgaaagccatgtttaaactgagttccagttcttgattgagcataggcacctcccccaattttcatgcctgtaatcaggctttctctagcgtacacagcaatggatgctcgttctccttggcatactggttcaccatagcgactttggtttccgcaacttcggcggtaaaaacgccgcaaatcgccttaccttcatagtgaaccgtgagcatcagttgcgttgcacgttctacatcataagaaaagaatttttgtaacacgtcaataacaaactccattggagtgtagtcatcattgactaatatcactttatacatagatggtggtttaagcgcatcacgaacttcatcttctaccagttgatcgaagtccagccaatctctcttactcatcgtcaatgttcgtcatcggttgctgttgccaacaggccgcggcctgtcgatgatctgaggttatgcacgttacaaatctacaatagatcatagataactatcatctattgcttccatccgcgacgcctgtcacattccccagcaatagcgttaactgcttcaaattttgacgcatttttcaccgtccaccctcgtcaattgcttgacgcatttccgtatttctctaaattgtactggcgagagttggcgagcaattgtacaactcgtgactccctaccggttcattccatcttacttataaagatttacgaaggatgtcgaagtatggaaatgggtactgttaagtggttcaacaatgccaaagggttcggtttcatttgccctgagggcggcggcgaagacattttcgcccattactccaccatccagatggatggttacagaacgctaaaagccgggcaatccgttcggtttgatgttcaccaggggccgaaaggcaatcacgccagcgtgattgttcctgtggaagcagaaacggctgcataactcttttgcttcattgtgtacatcctgctaataaaatgccagtccttctgactggcatttttatcaccttactctcgtgccaacgcatccacagggtctaatcgcgcggcattacgcgccggcaaccagccaaacagcaccccggtcaacgtcgaacataaaaatgcggtcaatagcgccagcggcgaaaaaccgatttcccaaccgggtaagaacagttgcaaaatgaacgcaatcatcaacgataaactcacgccgatggcgccgcccaccagacaaaccagcaccgcttcaataagaaactgctgcagaacatccctggcccgggcgccaaccgccattctgatgccgatttcacgggtacgttccgtcactgacaccagcatgatattcatcaccccgattccgccgacgaccagcgcgatcaccgccaccagggtcaggaacagctgtaaagtatgtgtggtcctttccgccgttttcaagacactgtccatattccaggtgaaaacatcttttttgccatggcggagctcaagcaatcgcaccagctgctgttcagcggtggcgctatcgtagccctcctgcacgcggacggttatcgagtttagccacgattgccccatcacccgtccggccatcgtggagtaaggtagccagacgcgaagaattttgctgctgccgaacatcgattgcttctcatcggccacgccgacaatcgtcgccggcatattaccgaccaaaatcacctcgccaaccactttcgccttgtgaggaaatagctggcggcgggcattgctatccagcaccaccacctgcgcccggctattcagctgcagctcattgaacgtatttccctcgctgaacgtcataccgtaaacattgaaatattgcgcgccaacgccttcggcgctggcggccacatcgatattattggcgcgcaggcgcaggcttttcgataccgccggcgtcgcagagctcacccacggctgtttttgaattgccagcagatcatcatattttaacgcctgctgataacgcggatcgtcatcgccaaaatctttgccggggtaaacgtcgatggtattggtgccgatagcgcgaatatcggctaagaccagttgtttcgccgcatcgccaaccaccacaatagagaccaccgaagcgataccaataatgatgccgagcatagtaagcagcgtacgcattttattcgccgccatcgcccgccaggccatcaccagcgcctcgcgaaaaccgctactgaactgacgccagacggaaggctccgcacgggattcggcgcgaagcacgccgcctttctccggcgatgacggcggcgggttacgcacaatttcaccgtcgcgcagctcgatgattctctccgcctgagccgcgacctgcgggtcgtgggtgacgataatcaccgtatgcccctgcgcctttagctgatgcaggatggccataacctcttcgcctgagcggctatccagcgccccggtcggttcatcggcgaggatcacctcaccgccgttcatcagggcgcgcgcgatactcacgcgctgctgctggccgccggagagctgcgacgggaagtattccgctcgctcgcccagacctaatcgggtgagtaaatctcgcgcccgttcaagacgaatccggcgctctttaccggcatagatagcagggacctcgacgttttgcgccgccgtgaggtgcgataacagatggtaacgctggaaaataaagccgaagtgctcgcggcgcagcctggccagttcatctccgctcagatgcaccacatcgaccccggcaacctgataggtgccgctggtgggcttatcaaggcagccaaggatgttcatcagcgtcgatttcccggaccctgaagccccgacgatcgccaccatttccccggcggcaatactgagggttatccccttcagcacgtcaacttcaccgtcgccagaggggtaactgcggcgaatatcacgcagttcaagcagcgccgtcattttgtcgctccgggcgtgctttcgctgataatcacctcatcgccctcttccagccctttcgctaccgccacatcggtatcgttacgcgcgccaataacgatttcacgctctttcacttccccgttgcgcagcaggcgcacgttgtagcggttatcgccgatggcgtcgcccagcgcgctaaggggaatagtaatcacgtttttcacttccgctagctggatatgcacctgcgcagtcatttcaagacgcaggatcccctgcgggttagggacttcaaaacgcgcataataaaatatggcatcattgaccttttccggcgtcggcagaatatccttcagcgtaccttcgtaacgagtcagaggatcgccgagtaccgtaaaccaggctttttgccccggcttaagatggatcacgtcagcttccgaaacctgcgctttgaccagcatggtactgaggtccgccagggtcaggatgtttggcgcctgctgggcggcaatcaccgtctgtccctgcagggtagtgatttgtgtcacttcaccggacatcggcgccaggatacgcgtatagtcgaggttggttttcgcggtgtcgagggtcgcctggttgcgtttgatctgcgcttcgatggtgccgatttgcgcctctttcaccgccacatcggtggcggcggtatccagatcctgacgtgagaccagctgacgctgcgccaactgctgctggcgcgctaatgttacttgcgcgagcttgcgttcggcctgcgcctgtttcaactgcgcgcgcagttccatgagcgtcgcgtcgacttctttaatctggttttccgcctgctccgggtcgataacccccagtagctggtctttctgcactttatcgccaatattgacgcgcagcgttttcaactggccgctgacctgggcgccgacgtcgactttacgcagcgcatctaatttgcccgtcgccagaacgctctgctgcaggtcgcttttgcgcgccaccagcgtttgatactgcggcaacggcgcgttaagaatgcgccatccccaaatggccgctatcactaccactaacgccaacagccaccagactttcctgcgttttccattcaatgtcataaaaaaattcctgatcttttccccgcagctcggacgatgattctatctaaaccgcgtgacaacagaacttaatttttagcaatccttcatttttgtttaagcggtgttaatcggggggatgatgaaatggcgaaaaaataacagaaccaggaatgatcatgtcttcaatcgctgaaaatccagattccgaactatcgcaacctaaaacaggttggaaacttttctgccgtctcgccagcggagagataacgccgggacgtgcctggcgtaacccggcataccgccgcaagttcattttacgttcattgatgaagccatttgccaccgcgcaattattaaacgacctggcgcgtcagcctcagcttccggccatgcttaacgtacagccgggtttaccctgccgactgcatcgtccctggttgtcggtaaattgcagccaacagcagattctggatgcgctcaatttccactatcaagctatgagtgaacaattgacgccgctggcgctaaatgggtatttatcacgtgcgggaaccctgctggcgactatcagcggtaaagacgatcggcagtttcgtattgtgctgcgcgctgagccgaatctcgataaggaaggcgaagccacgctaagtttcgtgacagaagaagatatcgtacttgccgaactcacctttacgctttgtcgactggaaggcaaacgcgtcatgtggattggcgggcttcaaggtgccaaagcaaatgtatcacatcagttgatacaagatgcgacgaaagcctgtcatggactgttcccgaaacgactgctggtggaagcggcgatgtcaatggggcaatcattctctgttgagcgcctgcaggcagtgagcaataccacacatatttatcgcagtattcgctatcgcaagaaaaaacagggattactgcatgcggattacgatagtttttggcaatcgttaggcgcgcatccgctggcgagcggcgatttccaactgccgctggtcatgccgcgtaaaccaatggaagagattgccagtaaaaaacgagcggaataccgccgtcgttatgccttactggatagcctacagcaacagagcgtcgcatgctgccgcccctaatcagcgcgcccacgcgccagccacagcacgcgggaaaacatctttttcagtaatgtcgggacggcgtctactccccgccgcccggcctccatcgcgacctctatcgccagatcgggtttcgacgaacgatgtatggcttttgttatcacccggcgcatgttcatcggcatattctccgggatctgcgccacacggtggtatacatcgtcgaacccctgacgatacataaagtgttccatgtccattgccggaagcatggttaagtgcacccgttccagttcgttatcattgttgagcagcccacgtaccgtagcggcatacttctttcctgcctcatcgccatcaaccagcacatgccattcaatccccatccggcgggcgaatttaatcagcggcttgagcccggattgggcgaattcaatcaccttcaccccttcagcgtcgaaatgatgcccgcactggcgcgccagttcgttgataacccaggtttccgtttcgccttccaccagcaaccagcagcgggcaaacagcgatgaggcgcggttgaagcgaatgtgaaacgcaatgcggcggctatcttccgcattcatcccgccgggaccgagccgccacgccgagacgcgggacgattcacgcaccaggcgacacacctgctcaaccggcgtcaacgacaacagctcgccggaattggtcgtggtcactcgctgcagcggtagcaaattcaataaatgccaggcgaccgagagcatgatcggatgcagacgcgtttccgggtcctcaatcagcagcagcggccgcgcatcgcgatcgagtcggacggttcccttcgcctgtaataaagtggagaacagcccaagcaggatcacgcgatgactgcgtccgccgggtttatcaatcattcggttaataatatcgagatagcgccagctgcgttgttcgtcatgagaacggcggcgcatcaggcgattgcggctttgcgcgctgctctgctcggcgaaataatgttccagcagttgcaccatcgccgacagcccttcgcggatttgcccatcggtgagattttgcggatgattgaccagttcgcgggagagaaaatccaactgacgggcggtgatctcaatttgcggcgaatgcggcacggtaccgttgtgaattcggcgcataaagcgggcgtcgcgcaggcgcaataccggcattaagcgcaccaggtggcgcgccagattgtcgatatcttgcatctccagcgcctctccctggcagttaataaaactacgcagggtcatcacgctgccgtcatccgccagctcaccctcaagacgatagaaaatgcgctgatagccgtcatcacagggcacccagcaatcgctaagcggacgaaaacggcgcacgcgatggcgcccgggttcattttcacggaaagttaaaatgatatgcagatgatgctcacgtccctgaatatcgccaggtggaaaccagaagtcatcgcgcacgaaatggtacaggtcaaattccggcgataacagcagcgtcagagcgtccagcaggctggatttaccccaggcgttttcgccgatcagcacattgttttgctcaagcatcaacgataaacggttgataccgcgaaatccgacgatctctacacgctcaagatgcatatcccctccgcctggcccacattctccttcagtaatcagtagtatagcgagacgcagacaacatggaacccccagcgtcgctggccgataattgaatccagaaatgaatgagtttgtaaggtaacggctcttgatttcatataattaataaattaattcatcttcggtagtagtttatttttcagcattgtgttctacacttgcataaatcatgcatggtgaaaggaaaatcatctcattgctctaaatcaaattacatcaatttatttaactagtccgagggtggcgttcgtccctaaaatagcgacgctttatttttatcgtcatcctttgcgtcgataaataaagaccggcacgtcataacgtgttcgtttacattattatttgaggtggttatgttcagaaaattagcagcagagtgctttggcacattctggctcgtattcggcggctgcggcagcgcagtgctggcggcggctttcccggaattaggaattggttttgccggcgtggctttagcctttggtttaaccgtattaaccatggcgttcgccgtgggccatatttccggcggtcactttaacccggcggtgacgttaggtctgtgggctggcggtcgtttcccggctaaagacgtcattggttatattatcgcccaggttgtcggtggtattattgccgccgcggtgctgtatgttgtcgccagcggtaaagccggttttgacgctgcagcgagcggcttcgcttcaaacggtttcggcgaacactctccgggtggctactccatgctgtccgctatcgttatcgaaatcgtgctgacctgcggattcctgctggtcattcacggtgcgaccgataaaaacgccccggcgggctttgcgccgattgctatcggcctggcgctgacccttatccacctgattagcattccggtgaccaatacgtccgttaacccggcgcgtagcaccgcggtcgctatcttccagggcggctgggcgctgcaacagctgtggctgttctgggtgatgccaattatcggcggtatcctcggcggcgtactgtatcgtaccctgctcgaaaaacgcgattaaccctcgcgagaagcccggcgacgccgggctttttctttttgccgacagctttactcggcctggcgaattgggtagtgtcattggcgctattcttaattcgcaaggaccatgccgttcatgttttcgggactattaatcattctgctgccgttgattgtcggctatctgattccgctgcgtcacccttccgcacttaaactgattacccggctgctgagctggattgtttacgtgatcctctttttcatggggattagccttgctttcctcgataatctcagcagcaatctgttatcgatactgcattactccgcggtaagcattgtggttattattctgtgcaatattgccgcactgctatggctggataaaaaaatgccgtggcgggtcaagcatcgtccggaaaaattaccctcgcgcctggcgatggctctcgagtcgctgcagctgcttggcgtcgtactaattggtttcctgctggggttaagcggcctctcatttttacaacacgcgactgaagccagcgaatatacgttaattttcttgttattccttatcggtattcagctgcgtaataatggaatgacattacggcaaattgtgcttaatcgccgcggaatgattgtcgcggtagtggtcgcggccagctcattatttggcggagtgattaatgcccttattcttggcctgcccattaaaaccggtctggcgatggcgtccggcttcggctggtactccctttccgggatcctgatgaccgaatcctatggcccggtcattggcagcgcgacattctttaacgatctggcccgcgaactgctggctattatgctgatccccggcatggtattgcgtagccgctccaccgcgcttgggctgtgcggcgcaacctcaatggactttactctaccggtgctacagcgctccggcggcgtagaaatcgtccctgcagctatcgtacacggttttatccttagtctgctggtgccggtactgatggcgttcttctcagcctgatcccccgtggcggtagattccctaccgccaaaattgcgctaaatcaatctccctttaagttgtgtcagaaataccttttctccgtacagccacaggcataaccttaaacatgtatctaaaatataactttaaaaggtgtgatcatgttttgtgtgcaatgtgaacaaactatccgtacgccggcaggaaatggctgttcttacgcgcagggtatgtgcggtaaaaccgctgagacctctgatttgcaggatctgttgattgcttctctgcagggtctgtccgcatgggccgttaaagcgcgtgaatatggcatcatcgatcatgaggtggataattttgccccgcgcgcattcttctctactttgaccaacgtgaacttcgactcgccgcgtatcgttggttacgcccgtcaggcgatcgccatgcgcgaggcgctgaaagcgcaatgcctgaatattgatgccaacgcttcggtcgacagcccggtagccgatctgcaactggtcagcgatgatctcggcgatctgcagcgtcaggcggcggactatacgccaaataaagacaaggccgcgatcggcgagaatatcctcggcctgcgcctgctgtgcctgtacggcctgaaaggcgccgcggcctatatggaacacgcgcacgtgctcggtcagtacgacaacgacatttatgcccagtatcataaaatcatggcgtggctgggtacctggcctgccgatatgaacgctttgctggattgttcgatggaaatcggccagatgaacttcaaagtgatgagtatcctcgacgccggtgaaaccacgaaatatggtcacccaacgccgactcaggtcaacgttaaagccaccgaaggtaagtgcatcctgatttccggacacgacctgaaagatctctataacctgctggagcagactgaaggcaccggcgttaacgtctatacccacggtgaaatgttgccggcgcacggttatccggagctgcgtaagttcaaacacctgattggcaactacggcagcggttggcaaaaccagcaggttgaattcgcccgcttcccgggccccatcgtgatgacctcgaactgcatcatcgacccaaccgtcggcgcctacgacgaccgcatctggacccgcagcatcgtcggctggccgggcgtcaatcatctggaaggcgaagatttctccccggttatcacccaggcacagcaaatggcaggcttcccgtacagcgaaatcccgcatctgatcaccgtcggcttcggtcgccagacgctgctaggcgcggcggatacgctgattgatctggttagccgtgaaaaactgcgtcacatcttcctcgtcggcggctgcgacggcgcgcgcggcgaacgtaactacttcaccgatttcgctaccagcgtaccggacgactgcctgattttgaccctcgcgtgcggtaaataccgcttcaacaaactggatttcggcgatatcgaaggcctgccgcgcctggttgacgccggtcagtgtaacgatgcctactcggcgattattctcgcggtaacgctggcggaaaaactgggctgtggggtaaacgatctgccgctgtcgttggtgctctcctggttcgaacaaaaagccatcgttatcctgctgacgctgctgtcgctgggggtgaaaaacatcgtcaccggtccgaccgcgccaggcttcttcaccccggacctgctggctatcctcaacgagaaatttggtctgcgttccgtcaccaccgtagaacaagatatgcagcagttgctgagcgcataaggagtcaccgcatgacaatgccaaccgatcagtgcccgtggcggatgcaggttcatcatattcagcaggaaacgcctgatgtgtggaccatttcgttgctgtgccacgactactatccctatcgcgccggacagtacgcgctggtcagcgtgcgccattcggcggatacgctgcgtgcctacaccctctcctcaacgccgggggtcagtgaatacattacgctgaccgttcgtcgtattgatgatggcgcaggctcacagtggttaacccgcgatgtgaaacgcggcgactatatctggctgtcggatgcgatgggcgagtttacctgtgaagataaaacaaccgatcgttttctgatgctggccgccggctgcggcgtgacgccgattatgtcgatgcgccgctggttagcgaagtatcgtccgcaggcggatgtgcaggttatctttaacgtgcgttcgccgcaggatgtcattttcgccgaagagtggcgtcaatacccggtcacgctggtggcggaacacaacgcgacgccgggcttcgtcgccggtcgtctcacccgcgagctgctgcaaagcgtcccggacctgacgagccgtaccgtgatgacctgcggcccggcgccttatatggagatggtcgaacaggaagtgacggcgcttggcgtgacgcgtttctttaaagagaagttctttaccccggtggcggaagccgctaccgacggattgaaattcaccaagctgcagccggcgaaaacgttctacgcgccagtcggcaccacgttgctggaagcgctggagagcaataaggtaccggtgaccgtcgcctgccgcgctggcgtctgcggctgctgcaaaaccaaagtggttgccggcggatatagcgttaccagcaccatgacgctgaccgatgccgaaatcgccgacggctacgtgctagcctgctcctgtcacccgcagagcgatctggttctcgcctgaggtcaaaacccccaaaagcgctacggtacataccgctttctggggctacaggaccgtaggccggataaggcattaatgccttatccggcacttttttaccgccaggccgactgaccggccaacgaataacgccctgcccctaatagcgcaatcgccagtgcgccgataaagaaatagaccaggctttcaatcgcccatgcgccgaccgcatccagcgcgaacgttttacctgtcccaaccatcagccaggccaccgccatggtaaatgccagcaccagcgccgccggacgggtcaaaacgccaagaataagtaaacaaggcgcgacgacttcccccaccagcacgccataggcaataaagcccggtagccctttcgcgaccagcatgtcgctgatgccatccacgccgtcgattagcttatgcagaccgtgaaacaacactaagccgccaacggcaagtcgtaacaagagtttaccggcatcttcatgcgacagcgttttatttactgcgtttaacaatcccttaaccatttgatgtgcttcctgttttacaccctgtgtgatcccagagtatgcacaatattccgccaacaaaaccagcgaaaaataaggggcaattggcaacgtaacctgtagtttcatctaagcttgatagcgttatcacaaaaaggagatggaaaaccatgaaacagaccgtagcgtcatatattgccaaaacgcttgaacaggccggcgtgaaacgtatttggggagtgaccggggattccctcaacggcttgagcgatagcttaaaccgcatgggtaccatcgaatggatgccgacccgccatgaagaggtcgccgcttttgccgccggcgcggaagcgcagctcaccggcgaactggcggtgtgcgccggttcctgcggaccaggaaaccttcatctgattaacggtctgtttgattgccatcgtaaccacgtaccggtgctggccatcgccgcccatattccgtcgagcgaaatcggcagcggttatttccaggaaacgcatccgcaggagctgttccgcgaatgtagccactactgcgagctggtctccactccggagcaaattccgcaggtgctggctatcgccatgcgtaaggcggtgattaaccgcggcgtgtcggtggtggtcctgcccggcgacgtggcgctgaaaccggccccggaaagcgccagcagccactggtatcacgctccgcagcccacggtcactccggcggatgaagagctgcacaagctggcgcagctgatccgatactcgagtaatattgccctgatgtgcggcagcggctgcgccggcgcgcaccaggagctggtggagtttgcggcaaaaattaaggcccctgtcgtccacgccctgcgcgggaaagagcacgtcgaatacgacaatccttacgatgttggcatgaccgggcttatcggcttctcttccggtttccataccatgatgaacgccgacacgctgatcctgctcggcacccagttcccttatcgcgcgttctaccctaccgacgccaaaattattcagatcgacattaaccccggtagcatcggcgcgcatagtaaggtcgacatggcgctggtgggcaatatcaaatcgacactgaaagccctgctgccgctgctggaagagaaaaccgatcgtcgcttcctcgataaagcgctggaggattatcgcgaagcgcgtaaagggcttgacgatctcgccaaacccagcgaaaaagcgctccatccccagtatctggcgcagcagattagccgctttgccgacgacgacgcgatctttacctgcgacgtcggtacccccaccgtctgggcggcgcgctatctgcagatgaacggcaagcgccgcctgttgggttcgtttaaccacggctcgatggccaacgccatgccgcaggctattggcgccaaagcgaccgcgccaaatcgccaggtcatcgccatgtgcggcgatggcggtttcagcatgctgatgggggattttttatcgctggcacagatgaagctgccggtgaaaatcgttatttttaataacagcattctcggctttgtagcgatggagatgaaagccggcggctatctgaccgacggtaccgagctgcacgacactaatttcgcccgcattgccgaagcctgcgggatcaaagggatacgcgtcgagaaagcctctgaggttgatgaggcgctgcagaccgcctttagcaccgacggtccggtattagtcgatgtagtggtagcgaaggaagagctggcgatcccgccgcaaattaagctggagcaggccaaaggatttagcctgtatatgctgcgggcgattatcagcggacgcggcgatgaagtgatcgaactggcgaaaaccaactggctcaggtaaaacaatgctatcaccctgaatcagaacaaggatatgccgtgatagatcttcgcagtgataccgtaactcgccccgggcgcgccatgatggaggtcatgatggccgccccagtcggggacgatgtgtatggcgacgacccaaccgtcaatgaactccagcgctatgccgctgagcttgcaggcaaagaggcggcgctgtttctgcctaccggcacccaggccaacctcgttggcctgcttagccactgccagcgcggcgaagagtacatcgtcggccagggcgcgcataactatctgtatgaagccggcggcgcagcggtgttgggcagtattcagccgcagccgatcgatgccgcggcggacggttcgctgccgctggataaagtcgcggccaaaattaagcccgacgatatccatttcgcccccacccgcctgttaagcctggagaatacgcacaacggtaaggtgttgccgcgcggctatctgcaagaggcctggacgttcacccgccagcgcaatctggcgctacatgtcgatggcgcgcgtatcttcaacgccgttgtagcgtacggctgcgagctgcgcgatatcgcgcagtactgtgattcgttcactatttgcctgtcaaaagggctcggtacgccggtcggttctctgctgctgggcagcgaagcgtacatccgccgcgccattcgctggcgtaaaatggtcggcggcgggatgcgtcaggcaggcattctggccgctgccggtctgtacgctctgcagaataacgtagcccgtctgcaggaggatcacgacaacgccgcgtggatggcggaacagctacgcgccgtcggcgctgatgtgatgcgtcacgataccaacatgctgttcgtacgcgtcggcgaggagcaggctcgggcgctcggcgaattcatgcaggctcgcggcgtgttgatcaacgcctcgccagtcgtgcgtctggtcatgcatctcgatgttaatcgccagcagttgacggaagtggtcggtcactggcaagcctttttacaacgctaaggagtcaggcgtgtcgcaatctattctggtgcttggcgccagcggctatattggccagcatctggtgcgcgaattaagcgcacgaggttatccggtgttggcagcggcacgccatatcgacaggctgcagaagctcgatcttcccggcgtcacctgccacgctatcgacctcaatcagccgcaggatctcccggcactgcttcgcggggtcgataccctttactatctggtgcatggcatgggggaaggcggcgatttcatcgcccatgaacgtcgggtcgccgttaacgtgcgcgatgccttacgtcagacgccggtgcgccaggtgatatttctcagctcgctgcaggctccggcacaggagcagtccgaccatctgcgcgcccgtcaggtgacggccgatgtcctacgcgagtcagggatccccgttaccgagttacgggcgggtatcatcgtcggcgccggatccgccgcttttgaagtgatgcgcgacatggtttacaacctgccggtgttgacgccgccgcgctgggtacgctcacgcacaacccccatcgcgctggaaaacctgctctactatctggtggagttacttaatcatccggctcgcgagcaccgcgtcttcgaggccgccggcccggatattctcagctatcagcagcagttcacccattttatggcggtcagcggcaagcatcgcctgttgatccctatcccctttccgacccgctggatttcggtgtggttcctgaacgtcatcacctcggtgccacccaccattgctaaggcgctgattcaggggctaaaacacgatctgatcgccgacgatcgttcgctgcgcgtgctgatcccgcaaaccttgattcccttcgatcaggcggtgcgtcgtactttgaaagaagaagagcagctggtgaactccagcgattggggctacgacgctcaggctttcgctcgctggcggccggagtatggctactacccaaagcaggctggctgcaccattagcacccaggcaagccgtaaggcgctatggcgagtggtgaaccaaatcggcggcaaagagggttatttcttcggcaacattctgtggaaaatccgcggcgccatggatctgctggtcggccatcgtttagccaaagggcggccgcagcatgattatctgcaaactggcgatacggtcgacagttggaaagtgattattgtggaagaagaacaacagctaaccctattgtttggcatgaaagcccccggtcttggtcgtttaagctttaccattagcgataaaggcgaccatcgtgaactggacgttcgcgcctggtggcatccgcacggtatgcccggcctgttctactggctactgatgatcccggcgcatctgtttatttttcgcggcatggcgcgacgcatcgcccgccaggccgagcaaatcacaggcaaaaacgaagattaagcgttattctttcatgattctcattgcatactcgggagaatcacggaaaaatgcgcacgaaattcttttctgggacagtagattgatatgaaggtactggttaccggtgcgaccagcggattaggccgtaatgcggtggaatatctgcgcaacaagggcatcagcgtgcgagcgaccgggcgcaacgaagcgatgggtaagcttctgagcaaaatgggcgcggagtttattcctgccgatctaaccgaactggtctcttcgcaggctaaagtgatgctcgccggtattgatacgctttggcactgttccagctttacctcgccgtggggtacccagcaagccttcgatttagccaacgttcgcgcaacgcgccgccttggcgaatggtccgttgcctggggcgtacgcaatttcgtccatatttcttcgccttcgctctatttcgattatcaccaccatcgcgatattcaggaagatttccgcccgcaccgcttcgccaatgaattcgcccgcagcaaggcggccagcgaagaggttatcaacctgctggcgcaggcgaacccgcatacccgctttacgattttgcgcccgcaaagcctgtttgggccgcatgataaggtctttattccgcgaatggtgcagatgatgcgccactacggcagcgtgctcttgccgcgcggcggtaacgcgctggtggacatgacttactacgaaaacgcggtgcatgcgatgtggttggccagtcagccgcagtgcgaccacttaccttccgcgcgggcgtggaatatcagcaacggcgagccgcggacgctgcgcagtatcgtgcagaagctcatcgacgagctgggcatcaagtgccgaatccgctcggtgccctatccgatgttggatattattgcccgcagcatggagcatttcggcaataaatcggcaaaagaacccgctttcacccattacggcgtttcgaagctcaatttcgactttaccctcgatatcagccgcgctcagcaggaacttggctatcagccgatcgttaccctcgatgagggggttacccgcaccgccgcgtggttaaaagaccacggtaaactacacgattaaaaccgacgcttacggcagcaagtcacccggtttgctgccaataggcgaaatacgcgcgcctgatttatcgatataaaaccactgcccgccaatcatcgacgtatgctcgccatcacgccgtgtattgcaaccgttacagaccagcgctttcccttctttaaacggccaggcgaagtcaaactgcgggataattaccgcctgaagctgtgcattataaaaaccgaccttaccctgctggcgagaacgcaccagtccttcagcaaattcatcgccgccattatcaaacggcagcaaagacagcgcctcactgcgatcgttaagtaagtaatagcgcccactacctggccactcagcagaactgatatacagctggtaaaggccattagcagacaacgcaagccgagataagcgcggggaaaaccgtggctctccatcaacccaactggcgcaattcaccagggtctcctcttctgcgctgattttcgctaaatacttgcaggaataactttgtgcggaagctacagaggtaaaacacatcgccgccagcgcaagacgcaatacatccttgttcattttattactccatcatccttgtccatatttttccagcaacgcttcggcgatcgcctgcgtttgcgcatcggccacgccgtcccagcgtgccggcctgaagtgcatctggaaggccataatcacccgtttttgctgcgccggggtcatctccggggtgacctgatagccgtagcgcgacagcaggtctaacaattctccgctatcaactggctgccagcctggacgcccttgcaaataaaaggcgacgcgtgaatcatcaggccaggcgccaattccctgctgcgccagcgcccgccacgggaacagcgggccagggtcgtccttgcgctgcggcgcgatatcggcatgagccacgacattttgcggctgaatgtgatagcgggcgatgatatctttcgccagcgggataagcgcgtcaatttgcgtcggattaaatggggtaaaactttttatatcgccgtttttttgccagccgcgattttccagctcaataccaatagaggtatcgttgatacgcgtgctgccgcgccagaagctgataccggcgtgccaggctaaatcttcctccggcaccagttgccagatacgcggtttaccgtggtgcagaggcggctgctcgggaattaaatagtgcgaactaacctctttatcggtcagggtcgccagcgagacatcaaagttatcggcggtatagtgaatgaccaggactttaatacgcggataggccgcctgcgccggatgacgggtatccaactgataaccctgtttgtcgacaataccctgctcctgcgcacagcctgccagcagcaaagcggcaagcgcaagctggataatgcgctttgctaataagaccatcgattacgtccttcttgcttggctttatacagcgcagcatccgcctgcgcgattaactctgacgccgggacgcgcccgtccgaggcgacaatacccatactgaccgtcactagcggcccggcatcggatttggcatgcggcagcgccgcttcgcgaatcttctgttggatccgctgcgccaccgccgtggcgctatctaatgattgcagcggcaggacaatcacaaactcctcgccgccatagcgcgccaccatatcctcctgcgcgcgtaccgacattttcagcacggaggcgatgcaggagaggcagtaatctcccgcctggtgaccgtagtgatcgttataacgtttaaaaaagtcgacatcgaggatgatcagcgccagcggctctttacgttcccaggcctgcgctaaaaaattgtccagcgcccggcggttggcggtcgccgtcaaggcatcctgattcgccatgttttccaaccgattaatcagttgcatgttctcctgatgggttttccaggcctcgtcataccagcgctgtaatatctgccggccataaatcataatggcggtgcatattccccacagaatcagaaaacgtaaatcgacaccatgatgtatttgcacgccagcgagtaatgaaataccccataaaggaacaaggtaagccacgaggcccaccggaaaataatagagcgcggcaagaccggtggtcattaaaataaccagcagcggccacgcgaacggcagcgaccataaaatgatgaagcagtaactactcaccgaccagcataaactgagaatcaacaaaatagcggaaatcacttttgtggcataaataccgcttaatatccgcccggagataaccatcatgcaaagcgccagcgagaaaacgataatggccccaagcgccatctccagataaggaataatatcctggtgagtcaagctctgatgatcgaactcggtgaacagaacgttgcggaagatgaccatcaaggcaaaggcgatattgacgaacgctaaccacggcatgctgcgcgacagtgcatgtttttgcacattttcgcgattggcccacagcattgctcgatcctggcgcggatccagccgttgttcggtcggcatagctactccttttttagcgactggacaagcagttgagctgcccgctgtgtctttctctttatgataaaccatcaaccccggaatgtctgttgctggccgcttcagcccctcgccgcttaacgtcattttcagctaacgacagatgaaaatggtcttaggctccgacaacgtctattacgcaaaaaaaagcaagcattatcaatgagaaccctgtcatcttttctttaaaaaatcgttaattttaggtcataaaaatgcagcatttcgcttgaaaaaaagacgggcttgattcaatctgatggcgctcattggttagttaaaacaagagcatgatgatagcaagataaacaatggagattaataatatgaaatatgcagctttagtggcaggtgcagcattgtttttaaccgcgaacgcgttttctgcagaaattctgagcaaagaagatttcgctaagttagagggtcaataccaaaaaattggcaccatctcctctaccggacaaactgcgccaagcgatgcgcgcgaagaactgatcaaaaaagccgatgaaaaaggcgctgacgttgtggtgctctcttccggtaacaccgataagaaactgcacgtatccgcgaatatctataagaagaaataattagttattgccgatatagaaacattatcatcgtatggtgatagtgtttcttacttattactctgtgaatatttatttttatactctttttccatttacccctcgttaatagtcatatcaaatatgcgccttcatcaggatgctaatccgtataacgcctaaaattggtaatccactccgttaacggactcgcaatatatcccccggactatcagtataaatccgacgctaaaaaagatatgtcctctatactttgggcataagaatatgctcgcgttttacattaccgcaggtggcaaatgaaaaaaatcgcattccttatttctgggttgctctgctctggcttcagccatgccagcgcactctatttttatgaaatcggcaccgaagacgtcggcctggcaggcgcggggcaagcggcgcgcgcgcaggacgcctccaccatcgtcaccaacccagccggcatgacccggcttcctgaccatatgtttaccggcggcgcgcaggtcatgggcggcgatatcccgtatcagatgaataacgaacacggcggtaatagccctggtaacgtgatgaatctgtttcctaacgccagcggcttttacgcacagaaaattaacgatgatttatatgccgggattggcttgtacggcaactacggtttaggcatcgattttggcaactgggccggcgatcgtcttatcaagaaaagcaccatggtggcgatgacgctgagcccgtcgctggcgtggaaacttaacgatcgtctctctgtcggcgcatccgccaacctgaactatggttatttatcgctgacgcgtaacgtcgacggtaatgacgagaaagataaagaccatgactgggcgatgagctatcgtctgggtctgctgatgcagttaaccgaccagacccgcgccggcatcacctggaacagtaaaaccgattatgactttaacgttaagggcaaagcacgttttcccaatttaccgaacgttgcgtatgatttgcctatctccgcccaggtccgcgcgccgcagcagatcatgctcagcatggtccacgatattaataaacagtggtcggtgatgggcgatctcggctggcaggactggagccagttcggcagcccgcaaatcaccgtttccggtcacgaaagtagtaaaaataaccgcctgaaggactcctggcataccgccgtcggcgtacagtaccggccgaccgagcagtggcgtctgaacgccggcgtcgggttcgacagcacggtttatgattcacaaagcgacaccgcgctctcgctgccaaccggcgatgagtggcgcttcgccaccggcgcgcaataccagataaccccggccagcaatatcggcgtcgcggtctcttatctgcacatgcaatcttcccacgtaaaatcaccggaaatcgtctccggcagatacgatcacccttacctgtggttcgccagcgtcaactatagttatcaattctgatacgccggctgcccgcataagaggcgcgggcagccgatggccgttgtcacatcaaggtcttagctctttgcgtcaagtacaattgtcgcgcttacgctatgctttagcagaatctaacaacgtagtgagttcataaggaaatcatcatgcgctacaacattcttgcacttgttttgccttgcgcactggcgctgagcgcctgtaccaccgtgaccccggcttataaagacaacggcacccgcagcggttcctgcatcgagggcggcccggacgaggtagcgcagcagttctatgattatcaaatccagcatcgtaataacgatctcaccgcgctgcgcccgtatctgagcgacgatttggctaaactgctgaacgacgctcgtcaggacccatcgcgtaacgcgctgctgcaatcaaatccattctccagcagttctaccccggcggatagcgccgacgtcgccagcgcctcaaccatcccgaaccgcgatgcgcgcaatattccgctgcgcgttgaattaaaacagggaacccagagctggaaagatgaagtgctgatgattcaggaaggccagtgctgggcggttgacgatgtccgctacctcggcataaacagccacgctccggccggctcgctgcgtcagagtcttgagaaacgctaatttcggcgttaaagccaccccgctgaaacgataaccccggtaaaatgtcggtattccgtgcggtaatgccgacatttgttcccccctaccacatgaacccatattttgtgctaactttagtgataaatgtggtttacatttaacttttaacgcataaatattgcataactattctgtcaaaggtactatttgcggcctcaatagctatttgtatcagactgcccagatgagtattaaactaaacggcattaattgcttctacggcgcgcaccaggcgctgttcgacatcacgctggattgcccgcagggggaaacgctggtgctcctcggcccaagcggcgccggtaaaagctcgctgcttcgcgtactcaacctgctggagatgccgcgttccggtaccttaaacatcgccggtaatcaattcgacttcaccaaagcgccgtctgacaaagctattcgcgagctgcgccagaatgtcgggatggtcttccagcagtacaacctgtggccacacctgaccgtggtgcaaaacctgatcgaagccccgtgccgcgtgctgggcttaaccaaagatcaggcgctggcgcgcgccgaaaaactacttgagcgtttacgccttaaaccttacagcgaccgctatccgctgcatctgtcaggcggtcaacagcagcgcgtagcgattgcccgcgcgctgatgatggagccacaggtgctgctgtttgatgaacccaccgccgcgttggatccggaaatcaccgcccagatcgtcagcatcattcgcgaactggcggaaaccggaatcacccaggttatcgttacccacgaagtggaagtggcgcgtaaaaccgccagccgcgtggtgtatatggaaaacgggcatatcgttgagcaaggggatgctaactgcttcgcgcatccgcaaaccgacgcctttaaaaactatctttcacattgatgttttcggggaaataacgatgaaaaaagtactgattgccgctctgctcgcgggcatgagcctttccgctaccgcagcccagactatccgtttcgccaccgaggcctcctaccctccgtttgagctggtagatgccaacaacaaaatcgtcggctttgacgtcgatctggctaacgcgctgtgtaaagagatggacgcgacctgcacctttactaaccaggctttcgatagcctgatcccaggactgaaattccgccgcttcgacgccgtcatggccggtatggatatcacccctgagcgtgaaaaacaggtgctgttcagcaccccgtattatgaaaactcagcgctgtttgtcggccagcagggtaagttcaccggcattgaccaactgaaaggcaaaaaagttggcgtgcagaacggtactacccatcagaaattcatcactgataagcatcctgaaatcaccaccgttccttatgacagctaccagaatgccaaactggatctgcaaaacggccgcattgacgccgtcttcggcgacacggcggtagtgaccgaatggctgaagagcaatccgaagctggcgccggtgggtgataaagtgacggataaagactacttcggtaccggcctcggcattgcggttcgtcagggcaataccgagctgcagcagaaatttaacgctgcgctggaaaaagtgaagaaagatgggacgtaccagaccatctatagcaaatggttccagaagtaacgctgaatgaacgaattttttccattagcaagcgccgccgggatgaccgtcggccttgccgtttgcgcgctggtcatcggcctggtgctggcgatgcttttcgccgtgctggagtcggtgaaatggcgccctgtggcatggttggcgaccggcatcgtgacgattttacgcggcctaccggaaatcctggtggtgctgtttatctactttggttcctcacagctgctgctgacgctgtctgacggttttactcttaatcttgggtttgtgcagattccggtacagatgcaaattgagaatttcgacgtcagcccgttcctctgcggcgccattgcgctttccctgctgtatgccgcctatgcctcgcagaccctgcgcggcgccttgaaagcggtgccgcaggggcagtgggagtccggacaagcgctgggtttgtcgaaggcggcgatattcttccgcctggtgatgccgcagatgtggcgccatgccctgccgggtcttggcaaccaatggctggtgctgctgaaagataccgcgctggtcagccttatcagtgtcaacgatctgatgctgcaaaccaaaagtattgctacccgcactcaggagccgtttaactggtacatcattgcggcagcgatatatctcgtcatcaccctgttgagtcaatacattctcaaacgtattgatcagcgtgcgacgcgcttcgaacggagaccaggttgatgctcgattacttacccgaactgctgaaagggctgcataccagcctgacgctgacggcggcatcgatcgtcgtggcgctgatcctggcgctgatctttaccatcgtgctgacgttaaaaacgccggtggtggtgtggatcgtccgcggctatatcaccctgtttaccgggacaccgctgctggtgcagatcttcctgatctactatggaccaggacagttcccgtcattacagaattacccggtgctgtggcatctgatctctgagccctggctgtgcgcgctgatcgctttgtcgttaaacagcgcggcttataccacccagctgttctatggcgccatccgcgccattccggacggccagtggcagtcctgcagtgcgctggggatgaacaagaaggatacgctggcgattctgctaccgtatgcttttaaacgcgccctctcctcgtactctaacgaagtggtgttggtctttaaaagcacctcgctggcttacactatcacgctgatggaagtgatgggtcatggccagctgctgtacgggcgcacctatgacgtgatggtcttcggcgcagccggtatcatttatctggtggtgaacggcctgctgacgctgctgatgcgtctggtggaaagaaaagcgctggccttcgagcgccgtaactaacatcacgaaatgcataaacagtaatatatgaaacgggtaagtgctaattcttacccgttttttttacaaccaacaaaataaacatacaactttattgcatataaattcatttggtggcattgtgaacttcagccgtaaaccggcacaacatcataagattgaccgacgggagtcccactatgaaaaagttagttctggccgcactgcttagctctttcgcctttggcgccgctgccgcggaaaaaatcagctttggcgtttccgcgacctatccgccatttgaatccatggatgcgaataaccagattgtcggtttcgatctcgatctggccaaagcgctgtgtaagcaaatgcaggctgactgtacttttaccaaccacgctttcgacagcctgatcccggcgctaaaatttaaaaagtatgatgcggtgatctccggcatggacatcacgcctgagcgtagcaaacaggtcgcgtttaccgacccgtactacgccaactcggcgctggtaatcgccaaaaaagacgcgtaccactcttttgatgacctgaaaggtaagcgtatcggcatggaaaacggcaccacgcaccagaaatacctgcaggataagcacccggaagtcaaaaccgtcgcttacgatagctaccagaatgccattatcgacctgaaaaacggccgtatcgacggcgtcttcggcgataccgcggtggtcaacgaatggctgaagaccaacccgcagttaggcgcggcgacgccgaaagtgaccgatccgcagtatttcggtaccggcctcggcattgcggtgcgcccggataataaagcgctgctggaaaaactgaacgccgcgctgaaagcgattaaagctgacggaacctaccagaaaattagcaaccagtggttcccggagtaagatctacgcttcccggcttacggcgcagccgcctgagccgggtctatcggtaacgccccccccctcacagcggcagggtaaactggaaacaggcccctgccggtacttccagcaggcgaatttcccccccgtgcagttgcagcatccggcgaacaatcatcaaccccagccctccccgtgaggcgctctgctgccccggttccagtaccgatggccgctcaaacagattggcccgtaactcaccggcgacgcccgggccgctatcggccacctcgaccaccacctgcgccccctgcaggcgcgacgacagacgaatttcgcccccgtgcggagtatggcgaatggcgttatccagtagattggttaatacccgctccatcatcgagaggtctgcctcaaccaaaggcaagcctgacgccaattccaggcgcagacggatttcgcgggtggcaatcgccagatcgaatttttgcgccacgtcctgaatcagctcggcaaggagaaacttttccggctgcggcttaataccgccatgttcaaggcgtgctagctcaaatagctgctgcgacagatgacgaactttacttccctggcgtagcgcgatattcagatactgcttacgctcctgcgccgtcaggcgatcatcctttagcgataacgtctccagatatcccagcagcgaagtgagcggcgtgcgcaggtcatgcgaaatattggcaatgaattcccggcgctgacgatcgctatcagccagccgatcccattgcccggcgatctgctgcgccagttcgataaagcggttatgcagcagcgccacttcatttccgggatgcgggtccggcgcctgcgccgccagcgctttgattgctcgaatgctgtcgctgtctccggctgccacctgcgccgtcagctggcgtaccgggcgtgttacccaataccacgccaggccgccggccaacagaccaaacagcgccaccagcagcagggtccatagcagcaggctccacagcgtcttctgccaggcgttttgtgccagttcattaaaagtttcgccctgcaggataatgtagagatagccacgtagctggccgtcaaggcgcagcggcgcggcgctaaacactttttgctggtccatgctgcgcggatcgtcaccataaattggccacgcgccgccggagagaaacgcctgcaccggcgccatggcaatgcgctggcgtttaatgtgccccggcggcgcggcatccgccagcagctcgccatccggcgaaacgaggtacagctcgacgcttgggttaaacaccatcagacggtcgaatagtggtttcaacgccgcgcgatcgacctcgccgcgcgcgttgagcagcggctcgcgggcggcgatctgctgcgccagaccggctgaaagccgttgcaccatgacgttaccgtactgcgcgctgctatagagctggagtagacaaacggataacgcgcacagcagcagcaaggcgataaacaccaacgataaccgctggctgaggctgagtcggcggatcatgactgcgccccggcgctatagggcgcaaatttataccccttcccccagacggtaagaataatgtccggctctgccgggtcgcgctctattttcgtacgcagacgattaatatgcgtgttgaccgtatgttcgtagccttcatgctgatagccccagacgctatccagcagcgccagacgcgaaaaaacttcaccgggatggcgggcaaagtaatagagcagatcgaattcgcgcggcgtgaggtctaccaattcaccgcgcagcctgacctcccgggacagcgggtcgatattcaggccgtggcaggcgatacgtccggcatccatcaagagattttgtcccatcgcttcctgacggcggaaaaccgccttcacccgggcaatcagctccagcagagaaaaaggtttcgccagataatcatcggcccccatttccagcccctgcacgcgctgggtttcgctggaacgggcgctaataataatcaccggtagatagcgcgtttgctgacggatgcgacggcaaatctccagcccgtcgatgttgggcaacatcaggtcaagaatcaccgcatcccagacgccgttatccagctggcgcagcgcctgcgcgccgtccgcctcgtgcacgatttgatacccttcatcctgcagattcaggcgcaacaaagccgcaatatcatcatcatcttccaccagcaggatttttttactcatcagattcgctccacgaatttcacgctcgtttcataaagcttacccgatttcagccgcttaaagagttcacattttgtttaaacttcacgaaccagcagcgtcagcacttcataatgcgcggtatgtggaaacatatcgaacaactgcacccgctcaaggcgatagccctgcagacgatcaatatctgcggccatcgtccgggcgttacagctcgaataaatgatatacgacggcgccatgcggcttagataatcgcacagttcggcgccgatgccgcggcgcggcgggttgaccagcaccagctgtggaatatcgtcttcatgcgtcgcgaattgcgtggaatccagcgcctgaaaatgaagattggttaatcccaattgggccgcggattgcttcgcgcaggcgatggcttccggggcgatttcgataccggtaaggcgcatctgcggggttgcgcagtgcaggccgaaaccgccgacgccgcaaaacagatcccacatgtggttgaccggcagcgcgcgtacccagtcgcgggcggtagcatagagctggctcgccaccgtcgggttggtctggaaaaagctttgcgggcggatccacagcggtacgccgttaaagttctccgccagcgcctgttgatcgctgaggaaaatctcctgctccccttccatgatagccatatgcacgggctgaatattggcggtaatcaccttaagctgcggcaactgctgctgtaaccacggcagcgcggcgcgcaactgtgcaagcttagccgcagaccgcagaacgaaacgcaacatcatgccgccctgttggctttcggtcagcagcaaatacttcagttcgccgcgcttgcgggcaacgttatagggggtgagtccggcgcgggcgataaacggcttcagcgcggcgaaaaccggttcaaaactcggcggatacagcggacaatcggtgagatcttccggcgtgccatcgcgatgcagcatgccgagcagcgggcgctcgacgctaccgcttacgaccattttcgctttgttgcgaaacgccgtctccgggcctgagaccggagcaagccatctcgccgctggatgacccgccagcagttcgcgcaggttcgccattttatcggcgagctgttgcatcaatggcaattccagccactgacaggaacggcagcggcccgcgtcgtaaagtgcgcaatgcataagaagaccttcaagaaaaccggggcggggattgtaacaccgttattgcaagcggaaaaaccgtcggcacgacgccgggataaacaataacgccagcaccagcagatccggcagcttttgcaaaaacagcgcatggagaatttcccgctttgactccccggccacgctgaacaattccggatagccgtagccaatcgaggccgcccacagataagagatgacgataatttgcgtcagcaggtagagccagcgcgcccagttgcggcctttcaccagcgaaaaggcgcaccagatctcgataaacaccagcgccaggctcgccagaaacaccagcgtcagggcccaggtttgcacgctacgatggacaaaatcggcaatcccctgcacgccgagctgattgaggatcattaacaggtcgagaccgcgaattaagataatagcaaaggccgccacctgtaccagcgcagggacgttaagacgagcatgagacgatcgagtttttgtagacaatcccaacgtaaagtcatccatgaaaacggcgccacgagtgcggcgccgataataggctctgttagcgattttagtgggttcagccccttcttgcacgctggatatcgcgcactcgctgcttttctgcgcgagccattaaataccaggcgataaaaccgacaattcccaccacgccgagaattaatgtcgccagggcgttaatttccgggttaacgcccatccgcacgctggagaaaaccaacatcggcagcgtcgtcgcccccggcccggagacgaagctggcaatcaccaggtcatcaagagacaaggtaaaggccagcaaccatccggaaatgaccgcaggcataatcatcggcaaggttatcacgaagaataccttcagcggcgcggcgccaagatccatcgccgcctcttcgattgacctgtccagctcgcgcagacgtgaagagatcaccaccgccacgtaggcggtacagaaggtgacatgcgccagccatatcgtcaacatgccgcgatccgatggccagccgatggaatgccccagcgcgacaaacagcagcagcagcgacagcccggtaatcacatcgggcatcaccagcggcgcggtgatcataaaagcaaaaccgttggaaccgcgaaaacggccaaaacgcaccagcaccaccgcggcaatcgtgccgaggatcgccgccgccgtcgccgcgcaggcggcaatggtcaggcttaaccccaccgcgctcatcatcgcgtcatcatgaaacagctcgctataccagcgcgtcgaccaccctgcccataccgtcaccagcttcgaactgttaaatgaatagataaccagcatcagcatcggcgcatacaggaaggtaaaaccgagcacgaggatcagaatccgccatggcgaacgtactaccggtaagtcattcatccatgatcccccatctgtttttgctgatgcttgtggaaccacatgatcggcacgatcaacagcagcagcatcacaatcgccaccgccgatgctaccggccagtcgcggttattaaagaactcctgccacagcacgcggccaatcataatgctgtcggggccgccgagtagttccgggatcacgaactcgcccaccgccggaataaacaccagcatcgagccggcgataatgccgcctttcgttaacggaacaatcacctggaagaaggtctttaacggcctggcgccgagatccagcgacgcttccaccagcgaatagtcgatacgcgtcagcgcggtataaatcggcagcaccatgaacggcaggtaggcgtaaacgataccgatgtacaccgccagattggtatgcaaaatctccagcggttgatcgataactccgagccacaacaggaagttattgagcaccccgttgcttttcagcagccccatccaggcgtaaacgcggatgaggaacgaggtccacgaaggtaatatcaccagcagcagcaggatattgcgcgtcgacggcttgctatgcgccaccgcccacgccagcggatagcccaatagcagacagcaaaaggtggaaattgccgccacctgcaacgactgcagataagcctcaaagtacagcggatcgtcggtcagctgcaggaagttgccgaggttgagcgtcaacgtcagttgaccgtcggcccacgacagtaactcggtatagggcgggatcgcccgcgccatttcggccagactgattttaaaaacgatcaggaatggcagtaaaaacagcaggattaaccacagatacggcagcgcaatcaccagcttacgcccgtgagccatctgctggcgcgccagccacagggcaaaaccgccgggctttttgccgccggctggaggttctaatgtgctcatcgtcctctccttacaccgtcagaacaacgcagctatcggcatcccagcacaagcgaacttcatcaccccaggtcggcattcctttgcgatggcgatgctcattttgcagctgcgcgctgatcatctgcccgcttttcagacggacatgatagatagacagatcgccgaggtaggcaatatggataacctcgcctaccgcaaagttaaagccgtccgccggcggttcgtcgcagagcatgattttctccggacgcagcgccacccagaccggcacgttatccaccaccgaggcatccggatcgactttcagcggatgcaccagccccggcgcattcagtaccaggccatcttccagccgctctttgaccagcccttcgaagacgtttaccgagccgataaactcggcgctatagcgggtcgtcggatgttcatagatctcctccggctcgccgatctgcacgaacttaccgcggttcatgatggcgatacggcctgccatggtcatcgcctcttcctggtcatgggtgaccatcacgcaggtgacgccgacgcgctcaagaatatccaccacctcaagctgcatccggtcgcgcagttttttatccaacgcgcccatcggttcatcaagcagcagcagtttcggccgcttcgccaggcttcgcgccagcgccacgcgctgacgctgcccgccggagagctggtgcggtttgcgtttggcgaactcctgcatatgcaccaacgccagcatctcctggacgcgggcgttaatctccgccttcggtagcttgtcctgcttaagaccaaaggcgatattttgctccaccgtcatgtggggaaatagcgcgtaagactggaacatcatattgatcggccgctgatacggcggcacgcgcgccaggtcgacgccatccagcacaatctgcccggcggtgggcaactcaaaacctgccagcatacgtagcagcgtcgatttcccgcagccggacgcgcccagtaaggcaaatatttcgcctttataaatagtgaggttgacatcatcgacggcgtgttgcccatcgaaggatttggttaaattacggatttccagcagcggggtcagcgctttgggggctttcgcctgtgggcggggcattgcgtcattcactcgggtgctctccggcaaatacaatcaccgtatggcccggttgccatacattcttcagttctatgtccgccagcgaacagcaggtcagacctttacaggcccggcgtaccgggcctgatggcgttattttccgcttttcactttggtccacgcgcgggtgcgcacgcggtcaatcttcggatcctgcaccttgagggtgaacagcttggcgaagacatcctcaggcgggtaaatcgccgggttgttgcggatgtcggcactgaccagcggcgtcgcctctttgttagcgttagcgtagtagacgtgatcgctgatatgggcaatgacctccgggcgcagcagatagttcaggaactgataggcttcgtctttatttttggcatccgccggcatggcgaagacatcaaagaaggccagcgctccctctttcggaataaagtaggagatattgacgccgttcttcgcctctttggcccgattcgccgcctgccaaacatcgcccgcccagccgatagcgacgcaaatatcgccgtttgccaggtcattgatatattgcgaagagtggaagtaacggatattgggccgcagcttcagcagcagatcggttgccggtccggtgtaatcatcggctttggtgctgtttggatctttgccgagatagttcagcaccgtcgagaaaatctcttcgggggcatcaaggaaggagacgccgcagcttttcagcttctcaaggttttccggcttaagcaccagatcccagctgttcaacggtacgtctttacccagcgccgctttcactttatcgacgttatagccgatgccggtggtcgcccacatgtatggcatcgcatatttattatcgggatcgtgacgcgccaccagttgtaaaactttcgggtcgaggtttttccagttcggcagtttgcttttatccagcggttggaataccccggccgccagctggcgttcaaggaagcttgccgacggcaccaccagatcaaacccggtgctgccggccattaatttaccttccagcacttcgttggaatcgaatacgtcatacaccactttaataccggtctctttttcaaaattggcaaccgtgtccggcgcaatataatcagaccagttataaacgtgcagcgttttttgttccgctgcgagcgagccggcagaaacggccatcagcgcacccgtaatcacacctgttaaccattttttacccaaggcggtcatatctctgtttccttctcaaggcccgttaattcacggacgcaatagacgaacctgaacgcatgcaagaatcatgcatatttttcattgcctgagataaggagaggaaacctctccctgattggctgcccgcaaatggacgcctcgccagaataactgtagccagaataagaggatatagcccaggcaaaaaaacgccctggatcatatttccagccaataaaggtctacgagataaaagcgaagcgctaaaacagcagtgaataattctttaaagacgggtttgagacagaataaataagcaaccgccatcgcagcggctgcttttattaattagtgcagaaaatggtattgcacttcttcggctgcggcctcttcttcctgctcttccgctttatacagcagttgattggcaccggcttccagaatgaccatcgagacctgctcttcgctctggcggaagaaccaggcaaactgttcgagagtgacgcccgcgccaacgggcagcgcctggcagaccaccagcttcggcaggttatcatcctgaatatcaaggaacgcttttacggtcagcgaactggcgttaatcgccgacagatccgccgacagcggcagcagcgcagagggcttcacttccgccagcgccgaaaacaacaccacgttgtccagcaggtcgattttggcatcgaaaataccgtcgaaattctgcatatgcggcaggtgcaacgcctggcaggagtcgcactcaaaaaaactgatgcctaactcgtcgagccaatgacgtaatgtatcaagacccggaacgaccagtgaatccatagtgcctgtgacctcttgctggataaaaaacgacgcatagcttacgcaaaaaatgcgtcgcattccatgaaaggataacgaagtgacgctaccctcccatttttagacaatatccaggcgtggcctgacgttcgatccacgcgatcatccgcccggcaatatcgacgtgagtggtggtttcaatcccttccagccccggcgaggcgttaacttccatcaccagcgggccgcggtgggcgcgcaggatatccacgcctgccacgtccagacccagcgtttgcgccgctttaatcgccatctcccgctcctgatcgctaagcgtggccgtagtggcgacgccgccgcggtgcaggttagagcgaaaatcgccctccttcgcccgccgttcaatcgccgccaccacctcatcgccaaccaccaggcagcggatatcgcacccttttgcctcagcgatatattcttgcaccagaatgtgcgcattgaggccccggaaggcgtcaatcacgctttccgccgcctgtcgcgtttccgccagcaccacaccgatcccctgcgtcccctccactaacttcaccaccagcggcgcgccgccgaccatggcgatcagatcgctggtgtcgtccggcgagtgagcaataccggtgaccggtagatcgattccctgacgcgccagcaactgcagcgagcgcagcttatcgcgggcgcgggtaatcgccaccgactcgtttagcggatagctgcccagcagttcgaactgccgcagcgcggcggtgccgtaataggtgatcgccgtgccaatacgcggaatgactgcatcaaaatggggcaactgtcgccctttgtagtgaatcgaggaggcaaccgggctgacgctcatatagcaggagagcggatcgaggatctcgacctgatgcccgcgtttttgcgcggcttcacgcaagcggcggcaagaataaagcgttccatcccgggataatatagcgattttcacccaacacctcttagaaaataactggcggccagcactctgcgtttgcaggttgaagtgtatagggaatcagcgcgttgcccagccctgtttatgcaaataatcgagaataaacggccggctctctttgatgatggtgcggcggatatgatcgctccaggtatcgcggcgggtattgctgccgcgcgtcagataatagtccgccagctgttcgtcatactgcgccagcacctgttgatcaagcggttgatagtgattctcatgcaccagcatcacaggcggaatacgcggcttaacctgcgggtcgtcagcaggccagccaaggcacaggccaaacagcggcaacacgtgtttcggcagctgcagcagctcggttaccgcgtcaatgttattacgcaggccgccaatatagacgccgcctaatcccagggattccgcggcgattaaggcattctgcgccattagcgcggtgtcgacaacgcccagcagcagctgttcagccagtcccaactgcgcttgcgggcaaatttgcaggtggcggttgaaatcggcgcagaatacccaaaactccgctgcctgcgccacgtgctgctggcctccggtcaactcaaccagctgctcacgcatctgcgggtcggtaatgcgaataatcgaggtacattgtaaaaagctggagctggaagccccttgcgccccggcaatgatcgcctcacgctgttggtcgctaatcggcgcgtcggtaaaatggcggatggaacggtggttacgcagcagatcaatggtcggcgtcatggtgtttttctcgttcggacggggtagaagatgaggtcttattatcggtcaactgcggcgcgacaattttcgctattcgccacattaaggctatcgccgccgggatcatcagcaggatcccggcaaagatcatgatgagcgccgccgtcgggctggcaaatggcgcaggcagctgaacatactggtttaatgacagccaggccaacgtcagcagcgccatgccgacgagctcaacaatcagaatacttttgggtaatgcggcaggcgatcgcataacgctcctcaatatactcatgccgcgcacagcgcatcgctggcgcatctgtatagggtcttgcagcagatgatattgatcaagcataacccgcaaccatcgctataaaaggtaaaaccttcttccccttgctaacggaacgcggcatcatagccacattcgccatccggctgagatttaaggagagaagcatgtttaccgttatttttggtcgcccaggttgcccgtactgcgttcgcgctaaagaactggctgagaaactgagcaccgagcgcgatgacttcagctatcgctacattgatatccacgcggaaggcatcagcaaagccgatctggaaaaaaccgtcggtaagccggtagaaaccgtaccgcagattttcgtcgatcagaaacacatcggcggctgcacggatttcgaagcctgggcgaaggaaaatctcggcctgtttgcctgagagacttcactcttccgttgagtgcctgcgtctggcgtccagccagacgcaaataaataaaaagcatagcgccccgagcgcgcaccagaagaccgcgctaaaaagccacgccagttcctgccaaaacgatcgatgagtaataaagaacatccgcatcaccaccagacaaaccggtgccgccagcatggcgccaatcagcggacgtatgacgcgccttccgggggataaacagctcgccacagcgccaggtagcacaaagaacagcagtccaagctcggggttgcccgtttgccgaaaagcccctttcatatgcagcaacagcgataaacagaccacaataaacagaaagaacccacaaattataccggcccacgcgcgctcagatttcacgatatcctcctgatttcgcctctaactatctttcacttcatccagtcagaaatagcattctggcagtccatgcttataacgctcccgtcagagtaaaacgattgtgactagccgcagcaaccaggaaagattaaactagcggcactgttttatcggtattaacgggatgccagaataacgttcggcatagtgcgaacgcttgagcaaccttagaccaaaaaaccatttccttcaacaacttactagtaaacgagaagttggctttcgtgaatataaacgtcgcagatttgttaaacgggaattacatcctgttattgtttgttgtactcgcactgggtctttgcctggggaaacttcgcctcgggtcagtacaacttggtaattccattggcgttttagtggtttctttattattaggtcagcagcacttcgccattaacacagatgcgctaaatcttggctttatgctgtttattttctgcgtcggcgtcgaagcgggccccaactttttttcgatttttttccgcgacggcaaaaactatctgatgctggcgctggtgatggtggccagcgcgatgttaatcgctatggggctgggcaaattgtttggctgggacatcggcctgaccgccgggatgctggcgggcgctatgacctccaccccggtgctggtgggcgctggcgataccctacgccactttggcctgcccagcgatcagctggcgcagtcgcttgaccacctgagcctcggttacgccctgacctacctggttggcctggtgagcctgatcgtcggcgcgcgctatatgccgaagctgcagcatcaggatctgcagaccagcgcccagcagatcgcccgcgagcgcggtctggataccgactccaagcgtaaagtctatctgccggttatccgcgcctaccgcgtcggcccggaattggtcgcgtgggcggacggcaaaaatcttcgtgagctagggatttaccgccagaccggctgctatatcgagcgtattcgtcgtaacggtatcctggcgaacccggatggcgatgcggtactgcagatgggcgacgatatcgcgctggttggctacccggacgcccatgcccgcctcgacccaagcttccgtaacggtaaagaggtgtttgaccgcgacctgctcgatatgcgtatcgtcaccgaagagattgtggttaagaatcataacgccgtcggccgccgcctggcgcagctgaagctgaccgatcacggctgtttcttaaaccgggtgatccgcagccagattgagatgccaatcgacgataacgtggtgctcaataaaggcgacgtgctgcaggtgagcggcgacgcccgccgcgtaaaaaccgtcgctgaccgcatcggctttatttcgattcacagccaggtgaccgatctgctggctttctgcgccttctttatcgtcggcctgatgatcggcatgatcaccttccagttcagctcgttcagcttcggcatcggtaacgccgccggcctgctgttcgccggcattatgcttggcttcctgcgtgccaaccatccgactttcggctatatcccgcagggcgcgttgaacatggtcaaggagttcggcctgatggtgtttatggccggggtcggcctgagcgccggcgcgggtatcaataacggtctgggcgccattggcggacagatgctggccgccggtcttatcgtcagtctggtgccggtggtgatctgcttcctgttcggcgcctatgtgctgcgcatgaaccgcgcgatgctgttcggcgcgatgatgggcgcgcgcacctgcgccccggcgatggaaattatcagcgataccgcgcgcagcaacattcccgcactcggctatgctggcacttacgctattgccaacgtgctgctcacccttgccggtacgctaatcgtcatcatctggccgggccttggctagtcccggccgaaaatttttaactttttcgcaaaaaaatcggtgatgaacagaactttttcccaggatgtcagtcataactagtgccactgcttttctttgatgtccccattttgtggagcccatcaaccccgccgtttaggttcaaggttgatgggttttttgttgcctgaaattcagcttccttagaatcaacctcttagcagacaactcgtttctgcatgcaatgaccctcccgtgaaaaccgcccccgtcttaacagcagtctctggtcttgctttctcctcgcagaaaagcgcttcctcaacgtccggtagttactgctattgaattgacgtacttaacctgctatgtaaaaacgtagtgttgatactttacttctactgataaggaattcagatgttaacgcaaagtcttattaatatattcagcaaagaaatgatagggacagttatcaccgccctgcccatcataaaagccatcttaaattacttaaacaaacctttagatgacatcgatgatatatataaaaaagccaaattaagcacatggcgaattcgatttttcatgatcaaaatatcgacaaaagagatacccaggctgactcgcgcaaatgtgatattgttttccatcgtcttattatttctttttggcagcttagcaaccagttcatattatggcgtaaagctattacaagtacgtccgggctggacatctttaattcttaaagaaacggatgaatggtttttaatctcggaaaaagaagcatcagaacacgcattccatccctcatggcatctcacagaaaaaagctgtctctctggcgaggccaagcaactggcaaatgacaaaataataacaccacaactagggagatttatttgtgaatccttcaccaatacagatgacaaagagaacataatgaaatccattaaagataccactcacaataaacctgtcatcacctttctcatctcgatcattaccgttggctgcatatggttcataaccagcttaatattgacgttaatatatactctcagacttaaaaaattcattatccgggagcatgaaaaagcctatgactatctaacatagcactccagactttagcttaggaggtgagaactctgttacatttgtcatttgcacgacgtatattatcagttccggtaatattgttactggaactgcagagcctatcatcctgtgataattattgatattattgtccgcaacgattaagaggtgtttcggttgaaggtaaaaacatgattgatgtacagcaggaacaaacacttcagaagcacggttttaccagcaaagagatcaatatgctgcgaaaaggacttgagagtccacaacgtaaagatcaaagcctgcaggtcttgttggtggagctaaggcgtcgtttttacatgtcctgtatcatcatcattgccctgcttatcttttgcggctacgcggtgctgactaattataccggttatgggctggcttactttgctgcacctttgcactaatagctacacctcatccgctttcatggaaagcgataatattcttaagaaagaaactctacccaaattaatttaacaagcaattttttcatcagtacgatacgttctccctatgttgtataactgatatgtcctcaacatgccacttaaatatcccctcttaaataatccgcgataaagcttatcaagcacaccagcgaaaaacagatggcgaaaccacccagcttgaataaccagccatccagagcaataaaacaaaccacagcggcgatagagaagctgcccgttccgacagcttcaaacatattgattgcatgaatgcagatctttttacaaacatagcttgaagagaatctttttggtttcattggctctttcttatccctgcatcaggtaacccaaggctaatcaaaagcgcgtctattggccagtaataattaaatcatttccttattaaatcaacaggttaaacaaacacctaataaagaaaatcaatccctaaacgtaactcccccctacttgcacagtctattttttcacccatactttgctgatccactcccacataaggcgctcttcatgttgcttaaagataagaccgtggtgattttcggcggcagcggcgcgattggccgcgcggcggcgctcgccatggcgaaagaaagcgcgcggatctttctggccgcccggcaggcggataagctggaaaaggcggcggctgagattcgcgccgcaggcgggagcgtcgagaccctgcaactggatgtgctggatggcgggcaaaccaccgcgcaggtggccaacctggccgggcgaaccggcgggattgacatcgtagttaatgccaccggctttctccacaatcaggggaaaacgctggcacaattatcccttgccgagtatcaccagggttttgtcccctttcttgatgcccaatttactattgcccaggcagtggcgccgtggatgggtggcgaacgcgagggcgtcattattaccactatccctccttccgcggcgatggccatccctggacacctcggccatatcgtcggctgcgccgcaatggaagcctttatcaacgcattggccagcgaactgggggagaaaaatatccgcgtgctcggcgtacggtcacacgcgatagcggatgcggcgctggcgggttcttatactgccgaggtatttgcgcctaaagcacaggcgctgggcttgagcgtcgaacagtggctgggtggtgcggcgcacggcaccatgctgcagcggttgccgacacttgagcagatagccggagtcatcacctttcttgcctcaccgtcggcggcggcgatgaccgccacggtggttaacgtcaccgccggagcgacgcttagctagcgctattctcccccgccagccgcccgaccattaagcgaatcgccgctttcgaaagcggcgcgctatcggtcacgaagtgcagcgtcatcccctcgataaacgcatccagcccgcgcgccgtcgccggttcaaaccactgctccagcgtctgctggctgcgcagcatccagctctgcatgaccgctttcagcgctggtcggctgctgcaaaacgcgtacagctggtacattaactccatattgcgcgcggtggtcacctgggcgctgaagataagctcggcgatagcgtcgcaggcctgttggcggctgccgacgccgtcgaaaaattgctgatactgcgccgacatttcgacggtgaagttacgaaacgcctcctcaatcagcgcctcaataccgctaaaataataggtcagcgagcccagcggtaccccggcgcagctggcgattttacggtgcgttaccgcatgaattccgtgcgcggcgatggtatccagcgtcgcctgcaggatgcgctcgcgccgctgcggatcgtttggtctgcgggtcatcggtgtgtttttcccctctgtgcgctatgcaaatcaagcgatagcggaatgtgtacaaatgtacacaaccttgctactgttgtctgcaactcttctttctcgggcgtttatggatgacggcgcaaacttctcgcaaagccctccagcttcggctgtgggcgctatttatgttcttttttatccccggcttattgatggcctcctgggccacccgtacgcccgcgattcgcgatttactaaccctctccactgctgaaatgggaatggtgctatttggcctgtcgattggttcgatgagcggtattctctgttcagcatggctggtgaagcgcttcggtacccgtaaagtcatccgcacaactatgttgtgcgccgtggcgggcatgctggtgttaagcctggcgctgtggctcgcctccgcgccgctgttcgcctttgggctggctatctttggcgccagcttcggctcggcggaagtggcgattaacgtcgaaggcgccgccgttgaacgggaaatgaataaaaccgtgctgccgatgatgcacggtttttacagtttcggcaccctcgtgggcgccggcatcggtatggcggtgaccggttttggcctgcccgccgcgccgcatattctgatcgctgcgctggtggcgattgcccctatccttatcgccattcgcgccatccctgatggtaccggcaaaaacgccgccgaatccgcccatagcgaggccaaaggcctaccggtctggcgcgacgtgcagctattgctgatcggcgtgatcgtgctggcaatggccttcgccgaaggttccgccaacgactggctgccgctgctgatggtcgacggccacggctttagccccacttccggttcgctgatttacgccggtttcaccctcggcatgaccctcggccgcttcaccggcggctggtttatcgaccgctacagtcgcgtcaccgtcgtacgcgccagcgcggtaatgggcgcactgggtatcgggctgattatttttgtcgacagcacctgggttgccggggtatctgtactgctgtggggactcggcgcgtcgctcggtttcccgcttaccatttccgccgccagcgataccggcccggatgcgccgaaacgcgtgagcgtcgtggcgattaccggctatctggctttcctcgtcgggccgccgctgctgggcttccttggcgaacattttggcctgcgtagcgccatgatggtagtactgggtctggtcatggtggcggcgctggtagcccgcgcggtagccaaaccgcagcctgaacctgtgatggagaatagctaatgagcatcaaactgattgcggtagacatggacggcacctttttaagcgatgccaagacctataatcggccacgttttctggcgcagtatcagcgcatgcgcgaacagggcattcgcttcgtggtcgccagcggcaaccagtattaccagctgatatcgttcttccccgagctggtcgatgaaatcgccttcgtcgccgaaaacggcggttgggtggtgagcggtaaagaggatatctttaactgccagctgccgacgacgcatttcaacgccgttgtcgaccatctgcaaacgctgccgcatatcgaaattatcgcttgcggcaaacgtagcgcctatacgctcaatagctataacgacgagctaaaagcggtggcggcaaagtactatcaccgtctcgaactggtggatgattttaaccatctcgatgacgcgatcctcaaattcggcctgaacgtgccggatcatctgatcccggaaattcagccgaagctacacgcggcgctgggcgatatggttaccgccgtcgccaccggctacggcagtatcgatttaatcatccctggcgtgcataaagccaacggcctgcgcattttgcaggagcgctggggcatcgataaccatgaggtggtggcattcggcgatagcggcaatgatattgaaatgctgcagcatgccggttttggtttcgccatggcgaatgccaaagcggaggtcaaagccgtcgccagtcatcatgctccgcataataacgaagaaggcgtattgcatattattgataaggtattgaatcgcgaagcgccgttcgcctgatgagaacccggatgcctttgggcatccgggtttactacgtatcacgcctgctgcgaactgccgacgcttttatctttcaggaagtaaataatcagccccagccatagcaccccgcccagcaggttaaacaggctgaacaggccgttaccgccaagctcatacgcatgcttgctaagctctatgcccacggtaaagatcagcatctgcagcatacccatcgccgccgaaaccgtccctttactcatttcgctggcgaacaacgttaagcgcaccagcccggcgttagccaggccaatcccgaaagcgtagaagcttaaaccagcggtcatccacagataagcatgggacgagaccaccgtggccgccgccgacaggagcaggccaaacataatcggccagccgcccataataatcagcgaacgtaccgagcggcgcgaggtcagacgcgccagcaccaggttgccggcgatcagcgcgccgaaaatcggcacctgcagcatgccgtactcatagctggtggcctgctcgccgctgatgataatcaccggcgattgcgcaatccacgccagcagcggcaggctaacaaaaccggtcgccagcgccccggcgacaaagcgcaggtttttcaacaccagacgatagtcgcggcccagctcttttaccgacagtttttcccccatccgcgtcgccgtttccggcatcgcccgctgcagccccacaaaggagatggccgccagcacggcgaacagcacaaacatcatctcccacggcagcatatgcacccaggcagcgccgaccagcggcccgagcagtggcgcaatcagcgcgacgttagccatcagggcggtaattttgatacacaccgcctcctcaaacgactcctggatagccgcatagcccaccgcgccgataaagcacaggctgatgccctgcaggaaacgcagcagggtaaattgctcaatggtttgcgccagcagcgtcgccagacaggtgacgataaaccacaccaccccggtcagcatcaccggacggcggccaatacgatccgacagcggccccaacagccactgcaaaaacatcccccccgccagataggcggtcatagaggtggggacccactcattgccgacctgaaactcctgcaccaccgcgagcatacccggttggatcatatcgttgccgatataggtggagaattcatataacacaaggcacagcgggaacagcaacgcctgacgaccgaggcgcttacctgataacgaataattctgcatgcaatctcttaattaaaaaaaaatcgcgcaaagtttaatgaaagtcgacccggggagatagtgaattgtgagtgacaatgaaaaatatcgccagcccgcggtccggcatgaaacgaatatttatatttcgtttatgtttcaatgagattacagccgatatacttgctatggcgaaataccggcaagggcatctcacgggtatatttcgtaacaaactgataattaagacaatgctgctttaccttatcgttacctttcaatatggtgagcggcttattgccatcgtaagcagagactggaagcatgctggaaaatatcaactacgcgctgtttgccctgattaacgccaccccggcctcctcgtggtgggcgattgaggtcgccacgtttattgccaaagacttaattatcattgtgccgctgctggtggtggcgctgtggctgtgggggccaaaccaacgtcagctggtatttaaggtcatgctggccctggccctgagcctgtctatttcgtgggttatcggtcatctgtttccacacgaccggccgtttgttgacggcgtcggctataacttcctgcatcatgcggcggatgactcgttcccaagcgatcacggcaccgtcatctttaccttcgcgctggcgtttttattctggcaccgggtgtggtccggcgcgctgctgctggtcatcgcctcggcgattgcatggtcgcgcgtctatctgggagtacactggccgctggatatgttgggcgggctgctggctggcatgtgcggctgccttgggtcgcaactgctgtggcagagcggcggtcatggcctctaccaacggctgcagcgcctgtatcgtctctgcttctcgctgccgattcgtaaaggctgggtacgcggctaacgtctgacaggtgacgaacccctcgccgccgggtaaaatcaagctgacgccctgcccttgcagggcgattttagctcagagggtatatggaaactcgtcgtgacgaacgcattaaccagctcattcaggcactcaagcgcagcgataaacttcacctgaaagaagcagcttcgctgcttggcgtatcagaaatgaccattcgtcgcgatttgaacggccacagcggcccggtggtgctgttgggcggctacatcgtgctggaaccgcgtagcgccacgcactatctgctgagcgatcagaaaacccgtctggtggatgaaaaacgccgtgccgcgcgccatgccgccgggctgcttgaagcgcatcagatggccttttttgactgcggcaccacgacgccatggatcatcgacgccatcgataacgagctgccgtttaccggcgtgtgctactcgttaaacacctttctcgccctgcaggaaaaaccgctgtgtcgcgctattctgtgcggcggcgaattccacgccagcaacgccatctttctaccgctcagcctgcaggataccttgagccatctcagcccggatatcgcctactactccgccgccggtatcgactgcgaacaaggcgcgacctgctataacctggaagagctgccggtgaaacactgggccatgaacaacgctcgctaccatgtactggttgtcgatcacagtaagttcggcaaagtgcgaccggcgcggatgggggagttatcgcgttttgacgtcatcgccagcgacgttcgcccggatgacgatctgctggcgctggcgaaagaaaagcaaatatcactgctgtactaaccgcgccccgtagggcgcagcctgtcgcttaagagaaccaactgccgaaccagccgtgcagtttcatcagcacgaagtcgaccatgcggctgaagaagccgccctctttcacgtcttccatgacgatcagcggtcgctgttcgatagttttgtcattgagtttaaagtcgatggtgcccaccacctgccctttcgccaacggcgcggtgagctgcggctcagtcaggttgtagctggctttcaggtttttcaactgcccgcgtggaatggtcaccgatccggcttcgccggcgcccagtttgacttcattactgtcgccgaaccacacacgctgggaaataaaggtggcatccggtttgattggcgtgacggtttcatagaaacggaagccccaggtcagcagtttttcggactcgttaaagcggatacggtcggttttagtgcccagcactaccgcgataaggcgcatatcgccctgggtcgcggaagagaccaggttgtagcccgcgccggcggtggtgccggttttcacgccatcggcattgaggttggtgctccacagcagacggttgcggtttggctgacggattttattgaaggtgaactctttctctttgtgtaccgcgtactcttccggcacatcatggatcatcgctttggtcagcagcgccatatcgcgcgcggtactgaactgccccggcgcgtccaggccgtggacggttttaaaggtggtgttggtcaggccgattttctgcgcgtaaccgttcatcagattgacaaacgaatcctggctaccggcgacatagtcggcgatagcgatgctggcatcgttaccggactgaattatcacgcccttattgaggtcttcaaccgatacctgcatgcctggcttcaggaacatcaccgaggagccacgcagcgccgggttgcccgtggcccacgcatcgcggccaacggtaaccgtatcggtcagtttaattttgcctgctttcagcgcctggcctaccacgtaactggtcatgattttggtcaggctggccgggtcgagtttctcgtcggcattaccttcactcagcactttgccgctggcatagtccatcaggatccaggctcgcgcatcaattgatggcgcatcaggaagttgatccgccgcctgcactgcaggggccacgagaagtaaaagcgcgcagcctgccgcgaggccgcgaagggaaaaagcatcatgcgtcataagagccacccaagtatcctttccaaacaaaatatgccgcaacactcttgccgcacagcacaaggcggtgagtaaagcgtacaaatgaccttaaagaaacagcgagttggtaaagtttttaaagtttacgcaataacgacgctgcctgctgaaaacaaggcaatttttttgatcgtgattgccttaatattaactttattccaacatgattgctcaccatgttgcaacggcgattaaataacatgcaggagcggatatgattacgttatggggcagaaataactcgaccaacgtgaagaaagtgcgctgggtgctggcggaactggatcttccttatcagcagattctggcggggctggagtatggcctcaatcacgacccggagtatctggcgatgaacccgaacggcctggtgccactactcaaagacgatgccaatgggctggtgctgtgggaatccaacgccattattcgttatcttgccgcgcagtacgggcaaaaccgtctgtgggtggagtcgcctgtgcagcgcgcgcagggtgaaaaatggatggactgggccaacgctacgctgtccccggcgcaccgtccggtattaatggggctggtcagaacgccgccggaccagcgcgatccggcggccattgaggcgggtattcacgcctgtgaagggctgttcgccatgctcgacgatgaactggcgaagcatgcctggctttccggcgatgagttcggccttggcgatgtggcggtggcgccgttcgtttataacctgctttccatcctcgacagctggcagccgcggccccatctgcagcgctggtatcagcaaatccagcagcgtcaggcgttccgcgacgtcgtcatgatcccggtcacctgaggtgattactccgggctgaccttgagcagttcgccgtcgggctcgtcggttaacagataaagataaccgtcgggcccgacgcgcacatcacgaatgcgtttgccgcgatcttttaatagccgcgtctcctcgctgagggtattgccgtccaccgagagcacaatcaatgactcatccttcagcgcgccgataaacaacttgtgccgccactgcgggaaagtcgacgcgttgtaaaacgccattccgctcagcgccggggaggccggccagacgtgcaacggtgcctcggtattcggcgcgctctttcctttagcttccgggataggttggccgctatagttaatgccgtgcgtcgccagcggccagccgtagtttttcccggcctggggaatattgatctcatcgccgccgcgcgggccgtgctcgttcagccacagcgtatcgctccacggattcatcgccattccctgcgggttgcgaacaccgtaagcccaaatctccggtctgatgccagtacgtccgacgaaaggattatctttgggtattgtcccctggtcagtcaggcgcacgacttttccctgcagcttatcgagatcctgggccgtcgggcgctgattattttcgcctaaaccgataaacagatgacctttgccatcgaagaccatccgcccgccgaaatgattgccagtggagagcttcggctgctggcggaaaacggttttaaaatcttccaggttttgcaggtcggcgctgaggcggccataccccaccgccgtccccgctttgccgtcatcgccagcttcggcatagctcagccatacccggcgcgactgagcaaaatccggcgccagaaccacatccagcaggccgccctggccgttggcccacaccttcggcacgccgcgaatgggcgccgataatccttgatcgagctgccagcgtttaagttcgccgccgcgcagggtaatcagcacgccttcattgtccggcaggaatgccagtgaccaggggtggtcgaggttatcctgcagcacctcaacgcgcggcgcggccatcgccgccatgggcagcagcacagtcataagtgttattttgagatatcggcgcatggcgcactcctttcgtcagcattgctgataagggtagccagcgtgggcggtcaggcagggatttttacataaactttaacagggggagtcgcctccccctggattcaggcgtgggtcattggcgctgagttattcagaatgtgaatattcatcgtcaatcccgacagacagcgttctagcttctctacgttaacggcaatataagccgggcaatcatgatgcccgctcatcaggcaaaccgccgccgaagcgacggattcgccggcaaggcggaaggcttccatctcttccggcgcgatggcgtgctgcaaacgcggcgcgtgtacgcgcagttcatggcatagctcaaacaagttatcacgcagatggtcattttcgctgactgacatatagcctttcgctttacgaagctggagataagccgccaaatcgatattggcattaatcagcttattcaaaaggttagtgtaacgtctgtcaacgctcatcacggtcctcctctgtcgtccattaccataatcatagtatggtcattttttgcacggaatcatgagcgaggtcaataatcgcacagcaattaacattatttacaatgttacaacctgggcggccaacaacgcggcttaaacgcctccgctgcgctaacgctttttcatcattcatcgccgcctggctatactctttttcgcaaagatctgtagaattcctgccctgaccattccaataaatgaacattttttaagctatgagcaatgtcacgcaccagccgaaaatcggcttcgtctccctgggctgcccgaaaaacctggtagactcagaacgtatcctcaccgaactgcgtaccgaagggtatgatgtggttcccagctacgacaacgccgatatggttatcgtcaacacctgcggctttatcgatagcgccgtgcaggagtcgcttgaagcgatcggcgaagccttaaaagaaaacggcaaagtgatcgttaccggctgcctcggcgcgaaagaagatcaaatccgcgaagtgcatccaaaggtgctggaaattaccgggccgcatagctacgagcaggtgctggaacacgtccaccactatgcgccaaaaccgaagcacaacccgttcctcagcctggtgccggaacagggcgtcaagctgacgccgcgtcactacgcgtacttaaaaatttctgaaggctgcaaccatcgctgcaccttctgcatcatcccgtcaatgcgcggcgatctggtgagccgcccgattggcgaagtgctggcggaagccaaacgcctggccgatgccggggtgaaagagctactggtgatttcgcaggacacctccgcctatggcgttgacgtcaagcaccgcaccggtttccacaacggtatgccggtgaaaaccagtatggtcagcctgtgtgaagagcttgcgaagctcggcatttgggtgcgtctgcactacgtctacccgtatccgcacgttgacgatgtgatcccgctgatggcggaaggcaagatcctgccgtatctcgatattccgctgcagcacgccagcccgcgcattctgaaactgatgaagcgcccgggttcagcagaccgtcagctggcgcgtattaaacagtggcgcgagatctgcccggatctgaccctgcgttccacctttatcgtcggtttcccgggcgaaacggaagaagatttccagatgctgctcgatttcctgaaagaagcgcgtctggaccgcgttggctgcttcaagtacagcccggttgagggcgccaccgccaacgaactggcggatcaggtcccggaagtggtgaaagaggagcgctggaaccgctttatgcagctgcaacagcagatttccgccgagcgtctgcaggagaaagtgggccgcgaaattatggtactggtcgatgaagtcgatgaagaaggcgcgattggccgcagcatggccgatgccccggaaatcgacggcgcggtctatctgaacggtgaaaccaacgttaaaccgggcgacgtgctgcgggtaaaagtcgaacacgccgacgaatatgacctgtggggttcccgggtctaatcccgcttcccggatagcggcttacgccttatccgggctaccaaaccgctcaaacccgtagccctgccaggcgtagtgcaggctgggataacccggatagcggcttacgccttatccgggctaccaaccgctcaaacctgtagccctgccaggcgtagcgcaggctgggctaacctaccaactttgctcccgccgcgtttgtctcctacccctttatcttcggatccagcgcatcgcgcaggccgtcgcccaacagattaaacgccagcaccgtcaggaaaatggcgatcgcagggaataacgccacatgcggcgccatcaccatatccgcgcgcgcttcgttcagcatcgccccccactccggcgtcggcggctgggcgccaaggccgaggaacgacaggctggcggcggagataatcgacacgccgatgcgcatggtaaaataaaccactatcgacgataccgtaccgggcaaaatatggttgaacagaatggtcgtatcgctggcgccgatactgcgcgccgactcaataaacgtctgctgcttcagcactaacgtattaccgcgcaccaggcgggcgaacgccggaattgagaatatcgccaccgcgataatcacgttggccatcccgctgcccatcaccgccactaccgcaatcgccagcagaatgccggggaaggcaaacagcacgtcgcagatacgcatggtgatgcggtcccaccagccttcgtagtaaccggccagcaggccgagcacggtgccaattagcgcgccaatcagtaccgccagaacccctgcggccagcgaaatttgcgcgccgaccagcacacggctgaagatatcgcgccccagcgaatcaacgccgaaccaatgcaccattgacggcccttcattgagccggtcgtaatcaaaatagttttccgcgtcatacggcgctatccacggcgcgataatcgcgacgataatcagcagcagcacaaataggcccgccgccatcgccaccggctggcgacgaaaacgccgccagaactcgtgccacggcgtgcggatctgcccgggcttaacgcccggcatggcgttgataaccgcttcccttctccagttgagcaatcgcaccttacttgtacctgatagccgggttaatggcggcatacattacgtccaccactaagttgataagaatgaactccagcgaaaacagcagcacttccgcctgaatcaccgggtagtcgcgcatctccacggaatcgaccagcaaccggccaagccccggccagttgaagaccttctccaccacaatggagccgccgagcagaaaaccgaactgcagacccatcatggtcactaccgggatcatcgcgttgcgcaggccatgcttcaacaccaccagcgtttcgctcacccctttagcccgcgcggtacgcatgtaatcctcatgcagcacgtcgacgaacgacgcgcgggtgaagcgcgccatcaccgatgccaccgcggcgccaagggtcaacgacggcagaatatagtgccgccagctgtcggcgccgacagtcggcagccagcccagctcgacggaaaaaacctgcatcagcagcatgccgagggcgaacgccgggaaggagataccggttaccgccagcgccatccccaaccgatccggccagcgattgcgccacactgccgcagcgatgcccgccgccatgccgaacagcaccgcccagctcatactggcaagcgttaaccatagcgtcggcataaagcggctggcgatttcgctggtcaccgggcggcgcgaagccatcgagataccgaaatccccctgcaatacattggtgatatagtgccaaaactgcacgtgcagcggctgatcgagccccaactgttggcgaaccatcgccaccacctgcgcatcggcttccggcccggcgatcagccgcgccggatcgcccggcagcatatgtacaaacaggaacaccagaacggcgacgataaacagcgtcggaatgaggcccagcaggcgcttcagaacgtaattcagcatcgccccctcccatttcggcagaaggaacgcgtgagcataagcattatcactgcgtcagatccgcctgctcgaagctaaaaccggtatccggctgaatataaaacccggtcaggtttttgctatgcgccgataccagcttttccaccaccagcggcacccacggcgactctttccagataatgtcctgcgcatctttatagagtgtggtcttctgttgcgcatcggtcgttttcagcgcctcgctcaggtctttatcgacctgcggattgctgtaaaacgcggtgttaaacagggtcggcggccagttttgtgaggcgaatagcggcgacagcgcccagtcggcttcgccagtcgacgctgaccagccggtgtagaacatccgcaccccgctctctttctgccccttgccttcaacctgcgccgcacgctgtccggcatccatcgccgtcacctgcgctttaatacccacctgcgccagctgctgctgggtaaactgcagcaccttctgcgcggtgctgtgattatgcgatgaccacagcgtggtgctaaagccgttcgggaaaccggcttctttcagcaactgacgggctttcgccgggtcgtaaggccatgcgctgtaggtctgggcgtaagcaatagaaggcggtacgacgccggtcgccggggtggcgtatccggcaaacgcgaccttgaccagcgcctgacggttaatcgcatagttaatggcttcccgcaccttcggattatcgaacggcttctgcgttacgttcatgctgatatagcgctgcataatcgacgggctggccaccagctccagcttgctgtttttcgccagcagcggcgcctgctcgtaagggatcgggaaggcgaactgcgcctcgccggtctgcagcatcgccgcacgggtgttgttatcgaccaccgggcgccaggtaatggaatccagcttcggcagccccggctgccagtaaccgtcaaacttgctgactttgacgaaatcggtctgattccaggtgtcgagcttatacggcccggtacctaccgggtggaaaccgatctccttgccatattttttcagcgccgccggcgaaatcatcgccgtcgccggatgggcaaggatattgataaacgccgagaacggttgtttgagtgtgattttgaccgtcgtcggatccaccgcctcggtgctggcgatattcttatacaggttatagcgtttgagatggttatccggattgctggcgcggtcgagattcgctttcaccgcttcggcgttaaaatcggtgccatcctggaatttcaccccgctgtgcagcttgatggtatacaccagaccatccgccgaaacggtataactttccgccaatacgttttgtagtttcatctctttatcaaggccgaacaggccttgataaaacgacttcgccaccgcctgcgataacgtatcgttcgcgtcatagggatcaagggtcgtgaagttggaaccgaccgccactaccacatctttcgcggcgaaggccggcgtcgccgccagcgccgaggcgatgccaagcgccagtagccatttgcgtgtaacaggttgagtcatgttgttatgctcctgcaagagtgcgttaggttgttatcggctcagtacatcggcgggctcgcgggcgacataatgccccggcgctaccagctgtaacggcgcgctgtcgatttcttctcccggtttatagatattccccggcagctcgtcagagagtaatacgcgctgcggttgacgatgcgccggatcggcgaccggcaccgccgccatcagtttacgggtgtaaggatgctgcgggttttcaaacacggcgcgacgcgggccaatctccacgatccgcccgcgatacattaccgctacgcgatggctgatgcgctccaccaccgccatgtcatgggaaataaacagaaatgcgatgcccatttcacgctgtaaatcgagcagcagattaataatctgcgcgcgaatagacacgtccagcgccgacaccgactcatcggcgatcaccactttcggattgagcgccagcgcgcgggcgatacagatacgctgccgctgaccgccggaaaactcatgcggataacgccacgcgtgttccgcctccagccccacgcgctgcaacagccaggcgacgcgttcgcgagccgcatccccttccagcagcccatgcacgcgcagcggctccataatggaataaccgaccgtctgccgcgggtcgagcgaagcgtaaggatcctgaaaaataaactgaatatcgcggcgcagagtctgtagcttgccgccggacagcgcatcaatacgctggccgttaaaggtgatgctgccgccctgcgcttccaccagccgcagcagcgcccgcccggtggtcgatttaccgcagccggattcgccgaccagcgacagcgtttcgcccggccacaggtcgaaactcactttttccaccgcatgcacttcgcgggtgacgcggttgagaataccgccgcggatcggaaaacgcgcgaccaagtcgcgtacctgcaaaatcggtttaccggctaccacggtattctgttccggctgctgggtcacaccgtcgttgagcagcgggaagcgtcgcggcaaatcgctgccgcgcatcgagccgagcttcggcaccgccgccagtagcgcccgggtataaggatgctgcggggcgcgaaaaatatcctcgacgcgaccgctttctaccgcttcgccgcgatacatcaccagcacgcgatcggcgatttccgccaccacgcccatatcatgagtgataaacatcacccccatcgccatctctttttgcagcgcggcgataagctgcaggatctgcgcctgaatcgtaacgtccaacgcggtggtgggttcatcggcaatcagtaccgccgggcgacacgataacgccatggcgatcatcacccgctggcgcatgccgccggaaagctgatgcggatagcgtgaaagcatcgcttccgcttccggaatacgcacccgttcgagcatctttttagcttcccgcagcgcctcgtcatggcgcagcccctgatgtagccgaatagactcggcgatctgttcgccaatggtgaataccgggttcagcgaggtcatcggctcctgaaaaatcatcgccacgtccgcgccgcgaacctgacgcatctgccccgccgtttgtgcattaatatcaatcacctgacggttgcgtcggcgcagcagcaacgcctcgctgctgacctcgctgaccgccccgtcgagcaggcgcatcaacgccagggcagtcaccgattttccggaaccggactcgccgacaatcgccagcgtctcgccgcggcggaggctaaatgacaggttacgcaccgcagaaacgcgctgccgctgctggctaaaggcgacgttaagatcgcgtaccaccagcacatcgtcttcatcaatttcatgactttgcggcaaactcgcttctccttttattcgcgataaattccaatcgtcggcgtatcgcccgcataacaccacgcccggtacatcccctcactgttgaacggcagcaccacattcccctcgcggtcgatggcgataaggcccccgctgccgcccagcgccggcagtttttcctgcaccactcgctcacaggcctcaaacaggctgagattgccgtactccatcaacgctgaaatgtcgtaagcggcgagtgtgcgcatgaagacttcgccggtgccggtgcaggagaccgcgacgctggcattattggcatagcagcccgcgcccggcactgggctgtcgccgacacgtccgggcagtttattggtcattccgccggtggaggtcgctgccgccagattaccggccagatccagcgccaccgcgccgacggtacccattttgtggcgttcatcgagcggcgcggcatgatggtcgagaataatctcgccgccctctttcgcctgctgcaactgcagaagccgctcggtggtagaaaataactcgttctcaaccagcgccatgccgcgcgaggcggcaaacttttccgccccttcgccgataagcagcacgtgcggactttcttccagcaccagacgcgccgccagcaccgggttacgcagatgctttacgccagccaccgagccggcctgcaggctatagccatccatcacacaggcatccagttcgtgagtttgatcgtgggtaaacacggaacctattccggcgttaaatagcgggcactcttccagcaggcgtaccgcttcggtcactgcatccagcgcgctggcgcctgctgccaacattttttgtccgctatcgacgatggccgacagcgcggccacatactcgcgttcgcgcgcctgagtcatctgcgcgcggctaatcgcgccggcgccgccgtggattgctattaccgccttacccattcaatctttcctttgccataaactgtatagatatcattatactgactaaccttttatacgttttttgaatatagaaagagcatccggtgatgtaaagcctcgtaccgcagtggcatacagtcgccggcgcttttctgccataataggcgttttcgacgttttgccagcaggagtaacccatggattttaccgccggactgatgccgctcgacacagccctgactcagatgctcgaccgtatttcgccgctgcaggccacggaaaccctgccgctgctgcaggccttttcgcgcgtgaccgcccatgatgtcgtttcgccgctggacgtacccggttttgataactcggcgatggacggctatgccgtgcgcctggccgacctcaccgacggcgcggcgctgccggttgccggtaaggcctttgccggccaaccgttccacgacgcctggccggcgggcacctgtatccgcatcatgaccggcgcgccggtgccggaaggctgcgacgccgtggtcatgcaggaagaaacggaacaaaccgacgccggcgtgcgcttcatcgcgccggtaaaagccgggcaaaatattcgccggcgcggcgaagatatcgccaacggcgcggtagtattcccggcgggtacgcgtctcaccgtagccgagttgccggtgctggcatcgctgggtattgccgacgtcgaggtagtccgtaaagtgcgcgtcgcggtcttctcgaccggggatgaactccagttgccgggccaaccgctcggcgacggccagatttatgatactaaccgcctggcggtacatctgatgctcgaacagctgggctgcgaggtgatcaacctcggcattattcctgacgatccggcaaagctgcgcgacgcctttatcgccgccgaccagcaggccgatgtggtaataagctcaggcggcgtctccgtgggcgaagccgattacaccaaaactatcctcgaagaactgggcgagatcggcttctggaagctggcgattaagccgggtaaaccgttcgccttcggcaagctcagcaacagctggttctgcggcctgccgggcaatccggtttccgccaccttaaccttctatcaactggtacagccgctgctggccaagctctccggcaaccgcggtcaaacccagccgatgcgtctgcgcgtgcgcgccgccagtcggctgaaaaaatcgccgggccgcctcgacttccagcgcggcgtgctgcaacgcaatccggaaggcgaactagtggtgagcaccaccggccatcagggctcgcacattttcagctcattcagcctcggtaactgctttatcgtactggagcgcgaacgcggcaacgtcgaagcgggcgaatgggtcgaagtcgagccctttaatcatctgtttggggggctgtaatggccgttgagctgagcgacgaggagatgctgcgctataaccggcagatcgtactgcgagggtttgatttcgacggtcaggagcgcttaaaagccgctcgcgtactggtcgtcggcctcggcgggctcggctgcgccgccgctcaatacctggcggcagccggggtgggtcagctcaccctgctggatttcgataccgtttcattatccaatctacaacgccagacgctgcacagcgacgcgaccatcggccagccgaaggtcgattctgcccgcgatgcgctggcgcgcattaacccgcacgtccggctggtcaccatcgatgcaatgctggatgacgcggcgttggcaacgcagattgccgaccaccatctggtgctggactgtaccgacaacgttgctgttcgcaatcagcttaatgctggctgcttccagcacaaaaccccgctggtctccggcgcggcgattcgtatggaagggcaaatcagcgtctttacctatcaggacggcgagccctgctatcgctgcctgagccgcctgttcggcgaaaacgccctcacctgcgtcgaagccggggtgatggcgccgctggtcggcactatcggttcactgcaggccatggaggcgattaaactgctgaccggttacggcacccccgcctggggaaaaatcgtgatgtatgacgcgatgacctgccagtttcgcgaaatgaagctgatgcgccacccgcagtgcgaggtgtgcggttcacgctaattccagccgccggcgaggcaggtcgccggttattttgtgaaccacgccgttctttttctccccatctctactacccactctgattgttgatttgcgtcaatataactttcattcgaaagttatttaatcttcatatgcaaataagagggtaaatcatgatcttcaacatccagcgctactccacccatgacggcccggggatccgtaccgtcgtattccttaaaggctgttcgctgggctgccgttggtgtcagaacccggaaagccgcgcccgcagcgaagacctgctgtacgacgcgcggttgtgccttgacggctgcgagctttgccagcaggcggcgccggaggtgattacccgtaccctggacggcctgattatccatcggcaaaacgtcaacgacgcccatattgccgcgctacgccactgctgccccactaccgcgctgacggtctgcggcgaggaaaaaagcgtggcggatattatggcgacggtgctgcgcgataaaccattttacgatcgcagcggcggcggcattaccctttccggcggcgagccctttatgaacccaacgctggcgcaggcgctgttcgaagccagccatcaggcgggcattcacaccgccgtggaaacctgcctgcacgtaccgtggaagtacattgaaccctctttaccgtttgtcgatctgtttctggccgacctgaagcacgttgacgaggccgttttccagcagtggaccgacggcagcgcccgccgggtgctggataacctgcagcgcctggcgcaggcagggaaaaaaatcatcattcgcgtcccattaattcagggatttaacgccagcgaagccgacattaccgcgattaccgattttgccgccgaccgtcttcaggtcagcgaaatccatttcctgccgtaccacacgctgggaatgaataaataccaactactcagtcagccctataccgcaccggacaaaccgctggccgctcccgagctgctggcctttgcgcagcagtacgcgcaaagcaaaggtttaacggcgaccctacgaggataacttatgaccaccttaaaactggatactctgagcgcccgcattcaggcgcataaaatggcgctggtgcatatcgttaagccgccggtttgtaccgagcgcgcccaacactataccgccgcctatcagcaacatctcgataaacccatcccggtgcgtcgcgcgctggcgctggcgcatcatctggcggaacgcactatctggatcaagcacgatgaactgatcgtcggcaaccaggccagcgaagttcgcgccgcgccgattttcccggaatataccgtcagctggattgagaaagagatcgacgatctcgccgaccgtccgggcgccggcttctcggtcagcgaagcgaacaaacgcgtattacatgaagtgtgcccatggtggcgcgggcagaccgttcaggaccgctgctacggcatgtttaccgatgaacaaaaagcgctgctcgccaccggcattatcaaagccgaaggcaacatgacttccggcgacgcccacctggcggtcaactatccgctgctgctggaaaaagggctcgacggcatgcgcgcgaaggtcgctgagcgccgctcacgcattaatctgacggtgctggaagatctgcacggcgaacagttcctgaaggcgatcgatatcgtgctcgcggcagtgagcgaacactgcaaacgcttcgctacgctggcgcgcgacatggcggcgcaggagccgcgcgaactgcgccgcaacgagctgctggcgatcgccgaaaactgtgaaattatcgcccaccagccgccgaaaaccttctggcaggcgctgcagctctgctactttattcagttgatcctgcagattgaatccaacggccactcggtctcctttggccgcatggaccagtacctctatccgtactaccgccgcgacgttgaactgcagcaatcgttggatcgcgaacaggccattgagctgctgcattgctgctggctgaagctgctggaggtcaacaaaattcgctcgggctcgcactccaaagcttctgccggcagcccgctgtaccagaacgtcaccatcggcgggcaaaatctggtcgacggtcaaccgcaggacgccgtcaacccgctgtcgtacgcgatcctcgaatcctgcggccgcctgcgctcgacccagccgaacctcagcgtgcgttaccacgccgggatgagcaacgacttcctcgacgcctgcgtgcaggtgatccgctgcggtttcggcatgccggcgtttaataacgatgaaatcgtcattccggaatttatcaagctagggattgagccgcaggacgcctacgattacgccgctatcggctgcatcgaaaccgcggtcggcggtaaatggggctatcgctgcaccggcatgagctttattaacttcgcgcgggtgatgctggcgacgctggaaggaggccgcgatgccaccagcggccaggtgttccttgcccaacaacatgcgctgtcgaaaggcaatttcgctaacttcgaccaggtgctggaagactgggatactcagatccgctactacacccgtaaatccatcgagattgagtacgttgtcgataccatgctggaagagaacgtccacgatattctttgctcagcattagtcgatgactgcatcgaacgggcgaaaagcatcaagcaaggcggcgcgaaatatgactgggtttccggcctgcaggtcgggattgccaacctcggcaacagcctggcggcggtgaaaaaactggtcttcgatcagggcgtcatcggccagcaggagctggcgaaagcgctggcggaagattttgccggcctgacccacgagcagttacgtcagcgcttgatcaacggcgcgccgaagtacggtaacgacgacgacagcgtcgacattctgctagcgcgggcctatcagacctatatcgacgagctgaagcagtaccataacccgcgttacggccgcggcccgattggcggtaactattacgctggtacgtcgtctatctccgcgaacgtcccgttcggcgcgcagaccatggcgacgccggatggccgcaaagcgcacgcgccgctggcggaaggggccagcccggcctccggtaccgatcacctggggccaacggcggttatcagttcggtaggtaaattgccgaccggcgcgatcctcggcggcgtgctgctcaaccagaagctgaatccttccacgctggagaacgagtccgataagcagaagctgatggtgctgctgcgtactttctttgaagtgcacaaaggctggcatattcagtacaacatcgtatcacgcgaaacgctgctggaagccaagaaacaccctgaccagtaccgcgatttagtggtccgcgtcgccggatactcggcgttcttcaccgccctgtcgccggatacccaggacgatatcatcgcccgtaccgagcatacgctgtaaggaaaatacccggccggcgctgcgctgagccgggtgacatcttctgtacccgttgataattggataaactttcattcgaaataaatttgtgctccccatcacattgtaattagaatgttactggtcgaagttaagccaggagcacctcttatgaccgttaaagttatcgtcaccgatatggacggaacttttctcaatgacgccaagcagtacgaccgcccgcgtttcctcgcgcagtttgcgcagcttaaacagcaaggtattgaatttgttgtcgccagcggcaaccagtactatcagctgatctcatttttcccggaaatccgcgagcagatttcgttcgtcgcagaaaacggcgctctggtttacgagcatggcaaacaggtgttccacggcgaactgacccgtcacgaatcacaggtggtgattggcgaactgctaaaagacccgcagctcaactttgtcgcctgcggcctgcaaagcgcatacgtgagcgataaagccccggacgcctttgttgagctgatgtcgaagcactaccatcgtctgcagcgggtaagcgattaccatcgcatcgacgatacgctattcaaattctccctcaacctgccggatagcgatatcccacagcttatcgataaattgcacgtctcgctggatgggatcatgaagccggtcaccagcggctttggctttgtcgatttgattatccccggcctgcataaagccaacggcatcagccgcctgctcaaacgctggaacctttcgccgcagcaatgcgtagcaattggcgacagcggcaatgacgccgaaatgttaaaactggtgaaatatgcttttgctatggccaacgctgccgacagcatcaaagccatcgccggtttcaccaccgatgacaataaccacgacggcgcgttgaaggtgattcaggccgttctcgataagacctcccctttcaacgactgatcctgtgccggggtatccgccccggcttttccattttgtgcgccgctgcataattttaaacttgcattaactctaatttaacttaaattaacgtttgtaagatttaatactttcgaatgaaagatacagcgaggtgattatggctgctctccctacccacgaaacattacctgccgaccataaagcggcgattcgccagatgaaacaggccttacgggcgcaaatcggcgatgttcaggcagtgttcgataaactctcggcgcgtatcagcgagcgcctggacgagattaacgccctgaaagccgcaggccaggaggtctggccgacgatcccgtttagcgatatcgcccaggataaagtgagcgatgcgcagcgtgaggcgattaagcgccgcggttgcgcggttatcaaaggccactacccgcgcgaacaggcgctggcctgggataacgcgatgctggaatacctggacctgaaccattttgacgacgtttacaaagggcccggcgacagcttcttcggttcgctggaggcttcgcgcccggagatctatccgatctactggtcgccctcgcaaatgcaggcgcgccagagcgatgaaatggcggcggtacaatccttccttaaccgcctgtggcgcttcgaacaggacggcaaacgctggttcgatccggatgtcagcgtgatttaccctgaccgcatccgccgccgcccgccgggaaccacgtcaaaggggctgggcgcgcataccgattccggggcgctggagcgctggttacttcccgcttatcagcaggttttcgccaacgtctttaatggcaatatcgacgcctacgatccgtgggacgcggcgcatcgtaccgaagtggaagagtacaccgtcgataacaccaccaaatgttcggtcttccgcactttccagggttggacagcgctgtcggacatgatccccggtcaagggctgctgcacgtggtgccgatcccggaggcgatggcttacgttctgctgcgtccgctgctggatgatgtgccggaagatgaactgtgcggcgtcgcgccgggcaaggtgctgccgatctctgagcaatggcatccattgctcatcaaagcgttaagctcgattcccgcgctgaatgccggcgattccgtctggtggcactgcgatgtcattcactcggtcgcgccggtggaaaatcaacagggctggggcaacgtcatgtacatcccggccgcgccgatgtgcgaaaaaaacctcgcctatgcgcagaaggtaaaaatcgcgctggaaaaaggcgcctcgccgggggattttccgcgtgaagattacgaatgcgactggcaggcgcgcttcaccgttgccgatcttaacgatcacggcaaacgtgcattgggcatgaagatctaatcatcatacagaccctgctgttctacggcggtatggctcttgcctggccggatccgccgcaccgaatcgcgtaccaccagggcgccgtgcagcagtagcgagccgtgcggcgcttccgggcgcagcagacgctgctgcaaaagatgtaccgcctcgctaccgagctcatcccgcggcacatgaatcgccgttagcggcacgtcctgaatcgccgccagattaaaaccgtcgatactcatcaccgagacatcctgcggcacccgcaggcctcgtttttgcagcgcgctgacggtaccggcggccataaaatcgccgcccaccagaaacgccgtcggcatcgggcgcccctgtaaagcgtcgagccaggcaccgacctgctcttccgtttctctggcgctaaagttggcgacgctaatcaggtcacggctaccggtaaatcgcaggttgcgcgcgcgccacgcctccttgatacccaccagccgtagctccatggtatagcggcgcaagcacatcacgttcattaccgcctgatggcccatatcaaacagataacgagcggcgcactggccaatcagccgatggtcaggcgcaatagaaggaagccgcatcccttcatcccggcagttaattaatacgcaaggtttgccaagatccgccgccagcgcgtggatatgccgatcgtcaatacccagcaataccgccgcctgggtgtcggtctcgttcatgcgggccagaaacagattggcgtcgctgtcgttttcttccagcgcgcaatagcgcagacgtacttcatgcggcgccagcgcgttattaatactctggatgacgcggtagtagaaaatatctgaacgttcatcgaaggcccgttgcggagcaaaaatcagcaggttgttgagcagtagccgcccggcggccaatccctgcatcacccccagctcatgggcgcaggccaataccgcctgacgggccttttcgctggtattcgcttttccggctaagacgcgcgaaaccgtactggctgacagcccggtgcgggcggcaatttcggcgactcgcagctttttatccattctgtgatccagctccaattcaaaaatgaaagaattttcatagtcgccaaaccctgactaacaagcaaatactccggcaaattatgagaactacgtcatctcatgaaaaattttgcataaatagcgctactgcccgccgcctttctcccttattttgaattggtccaatatcttccatactagttataccaatagatattgaaataaaaacaaataattcaaatagttagaactattacgtgacgactcagcggctgaagcgtcatttccccctacaacgtcttgtggagagttctatgagtcaaggcctcaacaatgatatggcagtcagcaaaacgcgccgggtggtgaaaaacctgcgctggtgggtgctggtgctgtttttacttggcgtcaccgtcaactacatcacacgtaactcgctggggattatcgccccggaactgaaagccactctcggtattaccaccgagcaatactcgtggatcgtcggcgcatttcagctggcttataccatcttccaaccgctgtgcggctggcttatcgacgtcatcgggctcaagctgggctttatggtttgcgccaccttgtgggcggtagcctgtatcgcgcacgccggagcaggcagctggctgcatctggctattttacgcttctttatgggcggcgcggaggcggccgccaccccggctaacgctaaaaccatcggcgagtggttcccgaaatccgaacggccgatcgccgccggctgggctggcgtcggcttttctatcggcgcaatgctggcgccacctatcatctacttcgcccacgcttccttcggctggcagggcgcgtttatgtttaccggcgtgctggcgctgctgtgggtcgtactgtggtgggtgttctaccagagcccggaaaagcacccgaatctcagccaaagcgagctggagtacatcaagcaggacaacgaagcgccgccggtgaagcagcccttttttaccgcgctaaaaaccgtctccaagaacaaacgtttctacggtatcgccatccccgcttttatggccgagcccgcctgggcggtgctgagcttctgggtgccgctgtacctggcgaaagagcacggtatggatcttaaacagatagcgatgttcgcctggctgccgttcctcgccgccgaccttggcagcgtggtcagcggttatctcacccgcctgtacgtccgttggttcggctgtacgcgagtcaattcggtcatcgccagttctgtgaccggcgcgtttctgatgatctcgctggcgctggtggccattacccgcgatccctatatcaccatcatcctgatctccattggcggtttcggccatcagatcatctcctgcatgctcagcgcgctggtggtggagtctttcgacaagggacaaatggcgacggtcaacggtatgcgcggctccgcggcatggatcgccagcttcctgttctcattattaatcggggtgaccgccgacaaaattggcttcaacccgctgtttatcgccatgggtttctttgacctgattggcgccgttttcctggtggcatttattgctgaacgtcgcgccaagcgcgcctgagagtggatgtaaaatatgaagacgttgaaacactggagtttgcaccaacagctggagcatcacgttgaattgaccgttgatggtcagcacactttgtgtctgtatgtgctggaagagaatttattccgcgtcctgctgaagcgccagggccaactggcgctggatcgcacctggagtatcgccccgcagcaggatgtgccgtgggaaggccgcgcgcgggatgacctcagcggttttagcctcccggcctggcagatgagcgaagcggatgacacgctgaccatcgccaccagccagctgcgcgtcaccgtccaccagccgctttggctggagtggagctatcgcgacgaggccggtgagtggcagacgctcgccaatgaccgcccaaccagcgcctatctggcaaacgcccacggggatggcgtcgcccattatcttagccgccgcaaagatgaacgttactacgggctaggtgaaaaagccggtgacctgcagcgtaacggcaaacgctacgaaatgcgtaacctcgatgccatgggctacaacgccgtcagcaccgacccgctgtataaacatattccctttaccatcacgcagcgcagcgatatcagctacggcctgttctatgacaacctgagcagttgctggctggatctgggcaatgaaatcgacaactaccacaccgcctatcgccgctggcaggcggaggccggcgacatcgattattacctgtttaccggtaagcaggtgctggatgtgaccaaagcgtttgtccgtttgaccggtaaaacgctgtttgggccgaaatggagcctcggctatagcggctcgacgatgcactataccgacgcgccggatgcgcaaaatcagctgatgaactttatccgcctgtgcgagcagcatgcgatcccctgtgattcgttccagctctcttccggctatacctcaatcaacggcaaacgctacgtctttaactggaactacgacaaggtgccgcagccaaaagtgatgagccagtcgttccacgatgccgggctgaaactggctgccaatatcaaaccgtgtctgctgcaggatcacccacgctatggcgaagtggcggaacgcggccttttcattcgcgattcgcaaaccgatgcgccggagcgttccagcttctgggacgatgaaggttcgcatctcgacttcaccaacccgcacaccgtgacctggtggcaggaaggcgtgaccacccagctactggagatgggtatcgattcgacctggaacgataataacgagtatgaggtgtgggacggcgaggcgcgctgctacggctttggccgcgaaatcgccattaagcatattcgcccggtgatgccgctgttaatgatgcgcgcctcgctggaagcgcagcaacgctttgcgccgcaaaagcgcccgtatctgatctcccgctccggctgcgccgggatgcagcgctacgtacagacctggagcggcgacaaccgcaccaactgggatacgctgcgctataacacccgtatgggattagggatgagtctttccggcttgtttaacgtcggccatgacgtcggcggattctccggcgataaacccgaaccagaactgttcgttcgctgggtgcaaaacggcgtgatgcatccgcgctttaccattcactcgtggaatgacgaccagacggtcaatgaaccctggatgtacccggaaatcaccccggcgatccgctctgccatcgagctgcgctaccgtctgctgccctatttgtacaccctgttatggcaggcgcatgccgatgacgaacccatgctgcgcccgaccttcctcgaccaccagcacgatacccagaccttcgccgagtgtgatgacttcatgctggggcgcgatctgctggtggcaagcgtggtggagcctggcgcccgtcagcgccagctgtggctgcccgataatcaggacggctggtacgatttttacagccaccagtggttcgccggtggtcagtgggtgacgctggacgcgccgctggaaaaactgccgctgctggtccgcgccggcgccggtctgccgcttagtgaacgtatcagccacgtcgatgcgcaaaaagacgatcgtcgcgaactgcagttgttcccgctgaaaggtaccggttcaacccgcggtttgctgtttgaagacgacggcgaaagctggggctataaagagggggatgcgctatggctggagtgggaaatgacctgcagcgccagcagcataaacctgacaattaatgctcgcggcaactatagtccggcgtggaaagccttgaagctgtcattaccggcgggagaaaaacgccaactgctggtgaatggcgtcgaagggaccgagtggaggctctgaccataggccggctgaaactgccggtattggtggtccagaaatccccggtggcgctaccgcttaccggggctacaacactgtgcggtttggtcgcccgggcaacggacagtttcagaagccataggtacaaaatagagaccttaagctcacaatggcacggaccgtaggccggataaggcgcagccgccatccggcgcaaaatcggttctttacccgcggttattgcccggcagcgctgcacttgcgcgggcctacagatcacatgccggggtaggtcgggtaaggcgcagccgcacccgacaaaaaaacggcaccgcgggtagatactgctatcggttggcagcgggtttggtccgggaaaaacagttcttttgtattaattcagagcctattgcgatcccgaaatgtcttctgcgttatggctctcatggcacagggagcgcggtgaagacattaaaggcaggtcgtaaggaccgtaggtcgggtaaggcgttagccgccacccgacaaaaaacggcaccgcgggtagcccgggtaaggcgtagccgctacccgggtaacggagagggattactcgatacctttactgcgcaggtaatcttcgtagttgccgctgaaatcgattacgcgttctggggtgatctccagtacgcgagtcgccagagaactcacgaactcacggtcgtgagaaacgaaaatcagggtgccctgatacatctccagcgccatgttcagcgattcgatcgattccatatccaggtggttagtcggttcatccatcaccaggatgttcggtttctgcatcatcagcttaccgaacagcatgcgacctttctcgccaccggagaggactttcgccggctttttgatatcgtcctggctaaacaacagacgaccaaggatactgcgtaccgcctgctcgtcatcgccttcctgtttccactggctcatccagtcaaagaccgtcaggtcgttctcgaaatcttcggcatgatcctgagcgtagtagccgatacgggcgttttcggaccacttgacggtcccgttatccgcttccagttcgccgaccagcgttttcagcatcgttgatttaccgacgccgttggtccccagtaccgccagcttttcgccaacttccagcagcagattaacccctttgaacagcgggccgttatcaaagcctttcgccaacgcttccacttccagcgcgttacggaacagtttcttatcctgttcgaagcgaatgaacgggttctgacggctggaagctttcacttcatccagcttaattttatctatctgacgggcgcgagaagtcgcctgacgcgattttgaagcgttggcgctaaagcggctaacaaaggcctgcaggtcggcaatttgcgctttcttcttggcgttatcagccagcagacgctcacgcgcctgggtcgccgcggtcatatattcgtcatagttgcccggatacacgcgcagttcgccgtaatcgagatccgccatatgggtgcagaccatgttcaggaagtgacggtcgtgcgaaatgatgatcatggtgctgtcgcgttcgttcagcacctgctccagccagcgaatagtatcgatgtcgaggttgttcgtcggttcatcgagcagcaggatatccggattggagaacagcgcctgcgccagcaggacacgcagtttccagcccggcgcgacttcgctcatcgggccgtaatgttgctccaccggaataccgacgccgagcagcagttcaccggcgcgcgcttcggcggaatagccgtccatctcgccgtattttacttccaggtcggccactttatagccgtcttcctcgctcatttccggcagcgcgtagatgcgatcgcgctcttgcttcacttcccacagctcgccgtggcccatgataaccgtatccagcacggtgaactcttcgaaggcgaactgatcctggcgcagcttaccgatgcgctcgttcgggtcgagagacacattgcccagcgtcggctcaagatcgccgccgaggatcttcataaacgtggatttgccgctgccgttggcgccaatcaggccgtagcggttgccgccgccaaatttgacggagatgttttcaaacagcggcttactgccaaactgcatggtgacgttgctggatactagcacgaggatatcctgaaaatagagaattagggatgtgatgaaccagacattatgccagcaaatggttcacttttcacggcttgcggtaaaaagcccgccaataactatgctatggtcagggttttaccgcaaaatgaccgattgctaagacataataattatccgcaattcagagggaatttatgaccacccgcaccagccatcctgcatttatctcgcttcaaggcggcatcaactttcgcgacctcggcggtcaacgcgcggccgacggccggcgcgtacgttccggcaaactgctgcgctcgggctcgctgcacaacatgacgccggaggatctcaatcatctcagcgccatcccgctgagccgggtgctggattatcgcgatccgacagaggtcaaccgcagccctgaccggctgaatagcgaagccttttacctcaacgccccggccaatccgctttccagcagcgtcaatgcgaaagtcaccgagtttaacgccgcgaccctcaacaccatggacggcgagcagtttatgctacagctctaccgccagttaccgtttgataacgccgcctatcgccagttgacgcaatggctaatggagccttttgacggcgccctgctgcagcactgcgccgtcggtaaagaccgcaccggcgtcggctgcgccctgacgctgttcgcgctcggctgtgatagcaatacggtcatggaagagtatctgctgacccaggggatgctggcgcaggtcgaaggattcctgctcgacaccttcggcgaaggccttaatgagcacgggcgtaaaaatctcgccgccatcatgaccgttcaggagtcatatctggcgaccgcgttgtccagcattgaacagcgttacggtcatgtcgaccgctggctggaacaggaataccgcctgacgccgcaggcgcgcgaagcgttgcagtcacggctgctggaagattaatccacgtttcactaaccagacgattcgccgtgaaagcggcgcgttgcgcactacactattagcaacaggaaaaaattgtgatttcgtacacatctgatttacctgtttatcggaaagcacatataatgcgctcccatctactatctgaatatctaacaaggcccgtgtggcgttgacaccgcgcacgacatgaagaatatgaaattatcgacactcttagcggcagccttcgccatcgtgggcttttgcaacacagcttcagctgttacctatcctctgccgaccgacggcagccgtctgattggccagaaccaggtcatcactattccagacgataataaacagccgttggaatatttcgctgccaaatatcagatgggtctgtccaacatgctggaagcgaacccgggcgtggatacctacctgccgaaaggcggtaccgtgctgaatattccgcaacagctgattctgccagacaccgtgcacgaaggcatcgtcatcaacagcgccgagatgcgtctgtactactacccgaaaggcaccaataccgtgatcgtactgccgatcggtatcggccagttgggtaaagatacgccgatcaactggacgaccaaagttgagcgtaagaaagcgggcccgacctggaccccgacggcgaaaatgcacgccgaatacgccgcggaaggtaacccgctgccggcagtcgtaccagcaggcccggataacccgatgggtctgtacgcgctgtatatcggtcgtctgtacgccatccacggcaccaacgccaactttggtatcggcctgcgcgtgagccacggctgcgtacgtctgcgtaatgaagacatcaaattcctgtttgagaacgtgccggtcggcacccgcgtgcagtttatcgatgagccggtaaaagccaccaccgaaccggatggcagccgctacgtcgaagtacacaacccgctgtcgaccaccgaagcgcagttcaaaggcggcgaaatcgtgcctatcagcctgactcaggccgtgcagtcggtgaccagccagcctgacgttgaccagagcgtaatggatcaggcgatccagaaccgttcagggatgccggtgcgcctgaactaagttcagctagcacatgaaaacggcgggcctggtgcccgccgtttttttatctgcatctgctaagcgctgcgccagcagggagcgcccccggttagccgttattgaccagaatgaccccgccatgatcgtagcggtagtgacagtgcgcgtactccagcggcgtaccgtcttccagatagataacctgctcaacctccagcaccgggtcggtcggctcgcagttaagatgtaatttatccagctcatccggcttcatcgcccgcaccacccgataagaccccatcagcttcagccccagcgtctcctgcacgtaacgaaacaccgagctttgtagatggcttttattgagccccggcaccagcgccaccggcattaccgtgagatccagcgagaccggctcgccgttaagcaaccgcaggcggacgaagtcatacaccggcgcatcggcgtcgatcagcagcgaactctgttccttctcgctgggaaaacgcagttcaaagcgcacgacttcgctttgcacctcgccgagatgctcccaggttttggtggcgccgaaatagtcgctgccgggcagttcccactgcgatagctggaggaaatttttccgcacaaaggtaccctgccctttgcgggtgtagataagcccctcgacaatcagctgacgcattgcctgctggatcgtcatccggctggtattgaactctgccgccagcgcaaactggtcaggtaacggcgcgctggcaggatactgctggctaatgatccgcttttttatttcccgcgcgatattaagatacttcgccgtcattctccgatcctttactattttgtgaggggctggggggcagcatacaccgcccgctcgccgttacatctcttcgctattactgtggataacccgcttcaaccacgcgtagcttttcttcggtacccgcttaagatccttgagatcgtggttttcacgattgacgtacaccacgccgtagcgtttacgcatgtcgccctgcgagctaaggatatcgattaatccccagccgagatagcctatcacctgcgccccgtcttcaaacattgccgctttcatggcgttaatgtggtcacggtggtaggcaatgcggtaatcatcggcgacctgattttcgccgtcccaggattcgatcaccccaatcccgttttcaattgggaagaccggcagccgccagtcgttgtaatagcgggtaatgatcgtgcggaatcccagcggatcgatctgccagttccattccgtcgctttcaggtatggattgtcctgattaccgaacaacatatagttgttcaccgccgtacctggcggaatcgcgtcgctattgagcgtgcggctggcgtagtagctgaatgccagatagtcgaccttcaccctcgccatcaacgcgatatcttcagggcgatagatatcgtcaaaaccttcacgggcgacaaaatgcatcacttccggactatagccctcgcccgcgtacgcgcgcagcaggttctgatttaaaaactcgtccagttgctgggcgcacagaatatcgcgcggcttacaggttgccggatagaccagcgcatgggccagcattccgcccatcagacactgcggtttggcctgatgcagatagtcggtgagatggacgtgcgccatcatcacgtggtgctggatctggtagagttcgcgcaacgttttatcgccacgcagatagccggtgatcagaaaagcctccggcgaatggtaaagattctgttcgttgaaggtcagccagtacttcaccttatcgccgtagcagtcgatcatcttctggccatagcggataaaagcgtccattacccggcgatcggtaaaaccgttatagcgctccgccagcgacaagggcatatcgaagtgatagaggcagatcatcggttcaataccgcgggcaatgagctcatcaataaactgatggtagaacgcaatcccctcttcattaaactcgccatctccctgcggacagacgcggctccaggcaatctggaagcgatagcagttcatgcccagatcctgcattaaatcaaaatcttcgcggaagcgatggtaggagtcggtcgctaccttccagtccgaggcgaactccgacggttcacggatatcatacaccgacatccccttccccccctcattccacgccccttcggtctgcatgctggagaccgaattaccccataaaaaattggccggtagtttgtctttcatggttcgcctctgtatatgactagtcatttaaatgttatgactagtcatatacaaaaaaaccactgccgaagcaaaagcaggatcgttttctgtgagccatacaaacaaaaaagatcgccgcaagcggcgatctttataagcacgaaaaaacagcgttactgcgcgtcaagctgcttacggcgatattccccctggcgctccagcatccaacccggatactcgcgcggcagcgcgctgaccgcgtcaagctggcgcagctcatcttcactcaggcgaatagcggtggcggcaatgttatcctgcaactgctcggcccgtttggcgccaataataacgctggtgaccgccggctgatgcagtaaccacgccagcgcaatctgcgccaccgagacccctttcgcttcggctatcacctgcataacgtcaatgcagtcaaaggcgcgatctttattcaccggtgggaaatcgaactccagtcgacgaccgcccgcttccgcctgaccatcgcggcgatatttaccgctcagcagaccgcccgccagcgggctccagaccatcaggccgagaccttcgctttgcatcatcggcaccagttcgcgttccagctcacgcccggcaatcgtgtagtaagcctgcagagaagcaaagcgcgagagcccgaggcgttccgcgatgcccagcgctttggcgatttgccatgccgcccagttagaaacgccgatatagcgcacatgcccctgctgcaccagggtgtcgagcgccgacagcatctcttcaataggcgtcgccggatcgaaaccgtgtaattgatagagatcgatatgatcgagctgcaggcggcgcaggctctctttcacgctgcccataatgtggtagcgtgagctgccgcgcgagttcaccccagcggtgccggtttcgccgaacactttggtcgccaccaccacgttttcacgcggtatcttcagattctttaacgcctggccggtgatctcctccgagcgtccttctgaataaacgttggcggtatcgatgaagttgatgcccgcatccagcgcgctgcccaccagctgttcggcttccgcctggcgcagctggccgatttttccccacatcccctcttcgccgccgaaggtcatggtgccaaggcacagctcagagacaaacaggccggtatttcccagtttttgataacgcatagcagtctcctcattcggatgattaacgtcagccagatagttatagcccgagcgtcgtcatcgcgaatggggtgttcctgcccgtttcttgcccaatcctctgaaaatcagcgccacagcgcgagcatggcgtaaccggtgagcgccgcccagatcagcagcggaatggaataaagatgaaaacgccaccagatccggcggtcgccggccatccgcagcgcaatcagattcgccagcgatccgggcagcagtccaaagccgccgacgttcaccgcccaggctaacagcatcgttggcggcacgtagttgagcagcaaaatagtcgacggcacgttgctgataaactgcgacaggccgattgccgtcagccatagcccgccatgcgagagctggccgacgtcgttcagccactgctgcagcaccggcagctgcgtcagcaggtgaacgtcgataaacatcgccataaacaccagcagcagcgaccagtcgacgttgataatcaccgctcgcgccagcagcaggaacccgacggcaatgagcgccagcccccagagttcctgcttcatctccagcgcagccagaaagataaggtagaaagcgaggcagctccacaccagctgcggccgccactccggcgctttgtcgctactttgataattgagccgagcggcggggaaacagaaccaacacagcaccaatagcgtgatcatcatcgccgccgccagcggcagcatctggccgataaaggcaagaaacgatagcccggagcggccccacagtaaaatattctgcggattgccgatgggcgttaataaagagccggcgttaaccgccagcgcttcaaaaataatcagccggttcaccgggatggcgcaccattttttcagcgttaacgtgaggggaacgacaatgaacagcgcgacgtcgttggtcaaaaaagtggaaagcagcgcggcagccagcaccatgaagatggccagttggcgttcggtgacgaaacggcgcgccattttgcgccccagcacatcaaaataaccgctcagttcaatccctttggtcagcagcatcagcccactaagggtgatgatagtgtgccagtcgatagcctgcccccagcgctgaggcgcgaaaggaacaaacaggctaaggataacggcgataagtaacaaaagatgcaggaaacggtcgcgagcgagcgactgcacaaaggggagattcattctgcgtgtaatctctgggtaaacagcttaaattgcgccagcgtctcttcgctaacgtggtgttccattccctcagcatcgcggcgggcaatctccggactcacgccaatcgccagcagaaagttttccactatctgatgacgctcgcggctttcatgggctagcttttccccttccggggttaagaagatcccgcgccaggggatctgttcgatcaagccgacactcgccagacgtttaagcattttcgccaccgtcggttgcgaaacgccaagacgcgcagccatatccacctggcgcgcttcgcccacttcgttgatcagatcggagataagctccacatagtcatcaatcagctcgcgacgatgcgcttcgcgcacctgacgaaacccctctacgtgttcttcgacattaaccagctgcgtcacttttttagttatgggcttacctgcgcgacggttcattgtgcttcctcgttggtgtgacgcgtcaagcatcatataaaaggatccacattgtaatggattgcgcccggagcacaaaaaaataacattttagccatagctataaaatatagcctgtgctatatctgtatgtaatgcaaacagccatcacggatttgacggcgcgaaaacgcaggaggaataaccatgaacgaattcaagaggtgcttaaacgtgtttagccattcaccctttaaagtacgcttaatgctgatcggcatgctgtgcgacatgatcaacggcaaaccgcagcaggataaacctaaccactaacgcggcgtcgcggtacgccgcttcatttttttgtcatttttccccgttaacctacccggttgtctcgcccttcagcgcttttttcaagttttgtaagctttctcgcaaaacaatctgttatgaacagttgaccttaccattcgcaggccctatcgtttgtcagccctgccactactgcggctcgcagagaccctcttcacgcactgtccagcaggttttacccccttgatgccaggggacgaacatggcgtcttgttgattacgaattatgaatgtcactctgaaagaaacgctggccgcccgcagactggccctgaacccgtggacaggattctactttttacagtcgctgttgattaatctggcgcttgggtatgaatttagcttgctctataccattgcgtttacctgcgtactccatctgctttggcgcacctttccgcgggtacaaaaagggatagttggcctctattccctgctggccgcgatgtactatcccttcggccaggcttacggcgcgccaaacttcaatacgcttctggcgctgcacgccaccaacgtggaagagtcgacggaaattctcaccattttcccctggtacaattatctactggcggtatttatcttcgccctcggcgtcattgccgtacggcggaaaccacagccgcccgcgcgcctcggcaaagtggaatatctggggctgctgtttagcatcggtattttcttcctgcagccagtgcaaaacctggcctggggcggcgtctttaaagtcattgatagcggttaccccgccgtgcgcttcgtaaaagacgtgatcgttaataacaatgaagtgctggatgaacaggcgcggatggcgcagttggcgaacatgaaagatagctggcacgtgctggcggtgaagccgaaataccatctctatgtcgtggtgattggtgagagcgcgcgccgcgatgcgcttggcgctttcggcggccactgggacaacacgccgttcgccagttcggtcaacggctatctgtttaaaaactacgtcgccgccagcggctccacgcagaaatcgctgggcctgaccctcaatcgggtggtagacggtaaaccccagtatcaggataacttcgtcaccctcgccaaccgcgcgggcttccagacctggtggttctccaatcaagggcaaattggtgaatacgacaccgccatcgccagcatcgccaaacgcgccgatgaggtgcagttcctgaaaaatggggattttgaagccaataaaaatacgcaggatgagcagctgctgaaactgaccgagcaggtattatcagtcgagcgcagccagccgcagttgatcgtattgcatattatgggctcgcacccgcaggcctgcgatcgtaccaaaggcaagtacaccacctttgtgcagtcaaaggagacctcatgctatctctacagcgtgacgcaaaccgacgcgctgttggcgaaactctacggccagctacagaattccggcagctctttctcgctcacctatttttccgatcacggtctggcatttaaagaacgcggtaaggcggtgcagtatctcgcccatgatgacaaatatcagcagaacttccaggtaccgtttatggtgctctccagcgacgataaagcgcataagatgattaaagcccgccgctcggcgaatgatttcctcagcttcttctcgcagtggaccggcatcagcgcacaggaaattaccccacgctatcgctttatctcggaacagaaagccggaccggtgtatatcaccaatttccagttacagaaggtggactacaaccatctgggcagcgacgagtttaccgtcaactaaacggtatcgccgaatcacagacaaaaaaatccgccccttgaggcggattttttatatcaccgaagtgattagaagcggtaacctacgccagcaatccaggtgccgacgtcaacgttacgaatgcgagactgctcgtaggagaagtccagggcaacgttttcgatcgggttgaactgcataccagcgccgtaagagaaaccgtagtcgctcatgtcggatttctggttcgggaagttgttgttctggaacttaccgtagccaacaccgattacgccgtagatgctcgcccagtcgttcagacggtaagccggaccagcggtgatgccgtagtactgacctttgttgtaagtaccgttgctggtgttgtctttttcggtgtaggtgaaggaaccgataacgcccagcgggttgttatcttgctcgtaacggtacttaaggttgaaaccgcctgctttgttagctttaccctgcatgtcgctctgagcgtaaccaccggtaacggtagaagttgcagcgaaagcagtagtacctacggatgcagccagaacaacggccagtgctgaaagacgtgcaattttattcataaccacctcaaatgtgtttctaataagtcctaagtcttaaatatatcaaaaacttttgggaaactcttttgactttacattgtctaacatactttttcatgtaagcaaaagtttccacgatttcgtaacaatctggaaatcaaacacttttcgcgcaaaaagtgcttaacgtttaccagccgtaagcgctgcgcatccagattattcttagttgcgaaggcattcccctacgcattttacgccattgtactgtttttccaccctcttttttcaacaatcgctaaaccgttaagcggttattccagtacactggaacctttacctcttttgacaaaccctgacaggagaaaggatgcccggctcgtcccgtaaagttccggcgtggttgccgatactggttattttgatcgccatggtctccattcagagcggcgcatcgctggcgaaatcgctcttcccgttgattggcgcaccgggagtcaccgctctacgcctgacgctcggcactttaattttagtcgttatttttaagccgtggcgactgcgctttgccccgcagcagcggctaccgctgttcttttacggcgtggcgctaggggcgatgaactatctcttctatttatcgctgcagcggatcccgcttggcgtcgcggtcgcgctggagttcaccgggccgctggcggtggcgctcttcggttcacgccgcccgcttgatttcgtctgggtggcgctggcggtgctcgggctgtggttcctgctgccgcttgggcaaaacgtaggggaagtggatttagtcggcgcgctgttcgcgctcggcgccggcgcattctgggcggtctatattcttaccggccagcgcgcgggtgaagaacatggcccggcgacggtggctatgggctcgctcatcgcggcggtaatttttgtgcccatcggcgtcgtccaggccagcgatacgctgctgcaatggtcgctgctgccgctggggcttggcatcgccattctctccaccgccctaccctattcgctggaaatgatcgccttgacccggatgcccacccgtaccttcggcacgctgatgagcatggagccggcgctggcggcgctgtcgggaatggtgttcctcggcgagacgctaaccctgacgcaaactctggcgttaggggcgattatcatcgcctcaatgggctcaacgctaaccatgcaacggcaaagcaaaatcgagaaagtcgatataaattaagattttgttaccgccctggctcgcgttcatagcgagccagttgtgtgcttctaattatctgatttaataaaactttttaaatagccaacaacttagcgctatcggactgatatggacagccgatgcctcatacccaatatcccttgctataattagtcccgaagtcatttgggacaaacgctctacataattcgaatttgaagtatgacgagtatcaatatcaagaggatatgaaactatgagtaccgcaaaactggttaaaactaaagcgtctaacctgctctatacccgtaacgatgtcgcagacaacgaaaagaaagctaccgttgagctgctgaatcgccaggtgatccagttcatcgacctgtcgctgattaccaaacaggcccactggaatatgcgcggtgccaactttatcgccgtccatgaaatgctggatggtttccgcactgcgctcaccgatcaccttgatacgatggctgaacgtgccgttcaactgggcggcgtcgcactgggtaccactcaggtcatcaacagcaaaagcccgctgaaaagctacccgctggatattcacaccgttcaggaacacctgaaagagctggcggaccgttatgccatcgtggccaatgatgtgcgtaaagcgatcagcgaagcgaaagatgaagacaccgccgatatctttaccgcggcttcccgcgacctggataaattcctgtggttcatcgaagcgaatatcgaataaacgtctaccgccgtcagcgcccgctggcggctttttccttttctcccacgctacccccacaatcgcttagctcgccctcttttggtgcatatgtatgtacacaatacgtactaaagtaaaacaattgtaataatcacctcacacaatcgttacagcaagattgttttcccatcagggtttgcgttaaaaatgctctggttattcgctacgtttatattgcaccaaaatgatgccccgtcacggtgcgtttgctgtatcgagtaaccgaaattgtgcaagcaatatgaaagctcctgttgaaaaacaatagcttgtaaaactggcacgattttttcattaggctacacgttctcgcaggggctcgtcccgtggataaaaaaggaaatactatgaagtctgtattaaaagtgtcactggctgcactgaccctggcttttgcggtttcgtctcacgccgcagataaaaaactggtagtcgccaccgatacggcgtttgttccgtttgaatttaagcaaggtgataaatacgtcggcttcgatattgacctgtgggccgcggtcgctaaagagctgaaactggactacaccctgaaaccaatggacttcagcggcatcattcccgcgctgcagaccaaaaacatcgatctggcgctggcggggatcaccatcaccgacgaacgtaaaaaagcaatcgacttctccgacggctactacaaaagcggcctgctggtgatggtgaacgcgaaaaacaatgacatcaaagatgtgaaagacctgaacggcaaagtggtcgccgtgaagagcggcaccggctccgttgattatgcgaaagccaacatcaaaaccaaagatctgcgccagttcccgaacattgataacgcttatatggaactgggcaccggccgcgctgacgcggtactgcacgacacgccaaacatcctgtacttcattaaaactgccggtcagggcaagttcaaagcggtaggcgaatcgctggaagcgcaaagctacggtatcgccttcccgaaaggcagcgacgaactgcgcgaaaaagtgaacggcgcgctgaaaacgctgcgtgaaaacggcacctacaacgaaatttacaaaaaatggttcggtactgaaccaaaataataatcaggacgacttcccgcggccaatccgccgcgggctccacggcgccagggtctctttgcccggcgccgtattcgcagaggctttctctgctttcgacacggtaacagtaacaggaacacattatgcagtttgactggagtgccatctggcccgccattcctattttgctggaaggcgccaaaatgacgctgtggatttcggtcctcggcctggttggcggccttatcatcggtctggtggccggtttcgcccgctgcttcggcggctggatagccaaccacatcgcgctggtatttattgaaatcatccgcggcacgccaattgtggtgcaggtgatgttcatttacttcgcgctgccgatggcgtttagcgacttacgcatcgacccgttcaccgccgcggtggtgaccatcatgatcaactccggcgcctatatcgcggaaatcacccgcggcgcggtgctgtccatccataaaggtttccgcgaagcgggtctggcgctggggctctcccgccgcgagaccatccgccacgtgatcctgccgctggcgctgcgccgtatgctgccgccgctcggtaaccaatggattatcagtatcaaagatacgtcgctgtttattgttatcggcgtcgccgaactgacccgccagggccaggaaattattgccggtaacttccgcgcgctggaaatctggagcgccgttgccgtcatttatctgatcatcaccctggtgttgagcttcattctgcgtcgtcttgaaagaaggatgaaaatcctgtgattgaatttaaaaacgtttccaaacactttggcccgactaaagtgctgcacgatatcgatctgaagatcaacaaaggcgaagtggtcgtgatcatcgggccgtccggctccggtaaatccacgctgctgcgctgcatcaataaactggaagagatcaccagcggcgatcttatcgtcgacggcctgaaggtgaacgacccaaaggttgacgaacgcttaattcgccaggaagccggaatggtattccagcagttctatctgttcccgcacctgacggcgctggagaacgtgatgttcggcccgcagcgcgtgcgcggcgcgtcgaaggcggcggcggaaacgctggcgaaagagctgctggcgaaggtgggtctcgcggaacgcgcgcaccactatccatccgaactctccggcggccagcagcagcgcgtcgctattgcccgcgcgctggcggtgaaaccgaaaatgatgctgtttgatgagccgacttcagcacttgacccggaactacgccatgaagtgctgaaagtcatgcaggacctggccgaggaaggcatgacgatggtcatcgtaacccacgaaatcggctttgctgaaaaagtggcatcacggctgatcttcatcgataaaggccgcatcgccgaagacggcgacccgcaggttctggtgaagaacccgccaagcccgcgtctgcgcgagtttttgcagcacgtagcctgatgcgcccggctctccccggtaaggggagagccgctttccagattcatcccaccgctccttctcctctgaccccttctatacttagcagtttgagatgcaatggaggcgcccatgccgtggatcctactgttgctcgctgcgctgtggatttcaccgctgtcggcggcgtcattgcccggcattccggcggcgacaaccgacaaaagcacagccagcgagcctgacctcgaacaaaaaaaagccgcctgggcggcattagctgacgtgctggataatccagactcgcgtcaggagttaatcgatgagctgcgcaaagccgccactacccagccccctgccgccgcccccacgctgaccccgccagaagtcaaagacgagcaaaccgtcctggaaagcgtgacggaaattagccgccagtatagcgagcgcctgtcgtcacggttttcgcagctatggcgcaatatcaccggctcgccgcataagcctttccatgccgatgcttttcgcaatgccgctggcgacttcctgctgctggccgggctggtatttgccttctggtggttagtacgcctggcggcgctgccgctgtaccgcaaaatgggccattggggaaggcacaaaaaccgtgagcgcaataactggcttcagttaccggcaaccattgctggcgcgtttatcatcgacctgctgctgctggcgctaacgctgtttatcggccagctgttaagcgatcgtttaaacggcggcaaccgcaccattgcttttcaacaaagcctgtttcttaacgccttcgcgctgatcgagttttttaaagccattctgcgactgattttttgcccgcggattgccgatttacgccccttcaatatcagcgacgaacacgcaatctactggaacttacgcctcagcgccctgagtagcctgattggttacgggctgattgtagcggtgccgattatctccaatcaggttaacgtgcaaattggcgcgctggccaacgtcatcataatgttgtgcattacggtgtgggcgttgtatctgattttccacaacaaacgcgccatcactcaggggcttatccatcttgccgaccgctcgctgccgttcttcagcttgtttattcgcgcttttgcgctggtctggcactggctggcctgcgcttactttatcgtgctgttcttcttttcactctttgaccccggcaacagcctcaaatttatgatgggcgcgacgctgcgcagcctcgctatcgtcggcgccgcggcgctggtatccggtattttgtcacgctggatagccaaaaccatcaccctgtcgccagaaacccaacgccactacccggagctgcaaaaacggctcaacggctggatctccgcctcgctgaaagccgcgcggatcctcacggtatgcgtggcggtgatgctgttgctgagcgcctggggtctatttgattttcagcaatggcttcacaatgatgccgggcagaaaacggtggatgtcctgattcgtatcgcgctgatcctgttcttctccgccgtcggctggaccctgctggcaagcctgattgagaaccgcctgtcatcggacattcatggacgcccgctgcccagcgctcgcgccagaacgctgctgacgctgtttcgcaacgcgctggcggtggtcattaccactattacgataatgatcttattgtcggaagtgggggtgaacatcgcgccgctgctggcgggcgccggggcattaggattggctatctctttcggcgcccaaacgctggtcaaagatattattaccggcatctttatccagtttgaaaacgggatgaacaccggcgatctggtgaccatcgggccattaaccggcacggtggaacggatgtcgatccgctcggtgggcgtgcgccaggataccggggcgtaccatattattccctggtcttcgataaccaccttcgccaactttgtgcgcgggatcggttcggtggtcgccaactatgatgtcgacaggcaggaggatttggataaagccaatcaggcgctgaaggcggcggtagacgatctgatggcgcaggaggagatccgcgggctgattattggcgaaccgtcgttcgccgggctggtaggactaagcaataccgcgtttacgttacgcgtcagctttacgacgctgccgctgaagcagtgggcggtacgctttgccctcgatacccaggtgaagcagcatttcgatcgcgccggcgtgcgtgcgccggtacaaacctggcaggtattgccgccgccgggcaacgtaaccccggcggcagagacttaaaatggacggcggcgctttgcgtcgtccataaagctccaggcgataaagcggctctgtttctgcccctgcgccatctcttttttcaccactttcaccgcgccgacttcggtcagcaggcgatacagcggcggcagattgtcgccgcgggagaccagcgaggtaaaccatttaacctggcggccgaactgctggctttcgcggatcatctgcgaaataaaggccacttcgccgccttcacaccacagttcctgctgctggccgccgaagttcagtacgctatcttcccccagccccagattacggcgtttacgctcgccgccggcacgcgcgctggcggcagaatcgtggaacggcgggttgcagagggtcgcatcataggtttcattcttatgaatgatgccggtaaagattgcctggccctctttctgacgacgcagacgaatttgtcgcgtcagtcctgggttgccgttgataatcgcctgggcgctggcaaaggcctgcgggttgacttcgctaccggtgaagcgccagccgtattcatgcacgccaatcagcggatagatgcagttcgcgccggtaccgatatcgagaatggtggcatttttcgggatctcgccgctatcctgcgccagcaggtcggccagatggtggatatagtccgcgcgtcccggcaccggcgggcacaagaagccgtcaggaatatcccagtgttttaccgcgtaaaagtgcgccagcagcgccttattcagcgccttcaccgccagtggattagcaaaatcaatggtttgctcacctaccggattcagggtgatatagctttgcagctcgggatgagtctggcacagcgctggcaaatcatagcgttggtgatgacggttacgcgggtgcaaccccggcttttcggctttcatggcaatctcctttcaacagccgcgtaagatacccgttgacggcggcgcggtaaataagggagtctggatatcttcttatttcgctttctggtgctctatgtacttctatcaacctgccgaaggccacggcctgccgcacgacccgctgaatgccatcgtcgggccgcgccccatcggctggatcgcttcgctcgatagcgcagggcaacgcaatctcgccccctacagcttcttcaactgctttaactatcggccaccgatcatcggtttcgccagcggcggctggaaagacagcgtgcagaacattgttgaaacaaaagaatttgtctggaatctggctacccggccactcgccgaagcgatgaatgaaacttccgccactattccacgtcatgaagatgaattcctgcgcgccggattgaccgccgcgccgagccggatcgtccgcgccccgcgcgtggcggaaagcccggtcaacttcgaatgtcgcctgtcgcagtgtattcagttaacgcgcgccagcggtgaagctatcgatagctggctggtgctcggtgaagtggtcgccgtacatatcgatgagtcgctgctggaagacgggatttatcaaaccgcgaaagcgcagccgattttacgcgccggcgggccgacggcctactacagcattgatgaaagccagcgcttcgatatgatccgcccggacgctcgttaacattagcgtagcaaggataatacatgccgccgcgggcgaatgcccggcggcaataagcgcgtaaagtggttgtttgcccactattatttatccggtggttctgctcatcacgacctaaacttaaggtatgtcccatgctgttaatgaggatatagccatgagaacctttctgctcgcccccgcttttatcgcccttgctctcctctccttacccacacaggccaacaaccccgagaccgctgccgtggccgttggcccgctgcgcccgtccggctcagtttccgcctccggcgccagcaccctcgacgatttacaggcgcaactggcgcaaaaagcccaccagcagggggcgattgcctggcgaataaacgccgctggcggcggcaacaaattagccggcagcgcgataatttataaataatccttctgccctcgtcgggaatacgcagccggaaatcccgcctccctggacttggctgcgcatttttcgcccccatattttctatactgtttatagattgcaaacacgaggagcgcatcatggcatcaggttgggcaaacgatggagccgtccaggatcaaattgacagcacggtaaacgatgccgtcgcccgcgcccgcagcgagcttcctggcggagagagcaacaaattttgtgaagaatgcggcgaacccattccggaagcgcggcgcaaggcgctcgccggggtcagatactgcgtgaagtgccagcaggataaagatttacataacaatacatattcaggatataatcgtcgcggctccaaagacagccagctgcgctgaccttcctttaccgttcattaccgctgattgcgctatcttttcacgcacgttttttggcgaaaaaagtggcaaaatgtgcctttagttgccatggcaactagtttgtccttctagcgcagcaatagcgtaaaataatttattaataatcaataaattattcttcattcaaaaaattcgataaagactgtgaatttccttcgattttatctcgcgacaaaaaacgtgatacttatcacatcgacggaacatcgtccctctacagaacacactgcgagagattaattatgaaaaacatcaaatacgctgccgctgctatcgccctttccgctctgtctttcggcgcattcgccgctcagccggtaaccccagcccaggcagaaagcatgaataaaatcggtgttgtttccgctgaaggcgcaacaacactggatggtctggaagccaaactggctgctaaagccgatgccgctggcgcaaccggctacagcatcacctccgctaacaccaacaacaaagttagcggtaccgcggttatctacaaataatcgcagcaatactctgaaatgccactgaattaaccctgaaaagaccttttaaatacccttgtttgcccgtccgagccaccggacgggcttttttttgtccgtttaccagcgttcggcaacctgcgccaggccattagcgagcgaagtcgcctgaccggtggcaaccaggcagcaggcaagctgaattttcagcgactgcggaaccggctcgctaccgctcacgcagcgctcaatccagcgcgcggtaatttcaggatctttggattccggcaatgccactttttcctgcacactctcgtcggcccgctcatgcaacactctggttcccgccgcatcaatcaggttaatttgcgggcagcgctgcgggttggcatagacttcaccttcggtaccgtgcatcagcagcgcccggccaccgatctgcgtaaagaacgccgcgaccttgccgacatattccggatgcgacacgctcgacagccgcaacgcggcatcttcagcgaacggcgtcgccagcttggccagcgtatgcgcgctgttgcgcacccccatccgccaacgcaatgccagctgcttttccagcggcgggcacagcgctccgaccgggatatagaccggctcatggctgtcgagacgcgcctgggcctgacccgcgtgggtggtggccgggatccccatcagcgcaagaatggtctcggtcaggatgcgggttggatcatgactgacgccatgaaccaccaccgggaaaccgagtttatgcagcagtaccgccagcagcggcgtcaggttggcctgtttgcgcgcgccgttatagctggggataacaatcggcatcggtttcgctaccggcggcgtcaggcggatagtctgtagctgcatcgcctcataaaagccctgcatttcggcttcgccttcgcccttgatgcgcagcgcaatgagaatagcgcccagttccagatcgtccacttcgccgtttaacatccgcgtatacagcgcacgggccgtgactaaatccaggtcgcgagcgtgatttttgccgcgcccgacttctttgatgattttggtgtaatccatcgatttgctccctccagcggtaggctccgccgaccgcaccgcttatgcgcttagcggcgtcggcgacgcgtctgttttgctttgctttttactataacctcgggaacgcccggctgctctatgggaaataccggtaacgcatttaacaatcgcgcgccgtaatttttagtcagcaggcgcttatcgtaaataatgacttcgccccagcactgatggctacggatcaggcgcccgacctgttgaatcaggttgaatgaggcgctcggcaggctttgcacctcaaagggatagcggttgaggcttttcaaccactcgccttcggtgatcactaccgggctgtcgatcggcgggaaggcgattttatggatatgcacctggcttaacagctctccttttaaatccagcccttcggcaaaagattgcaagccaactaacacgctgcgctcgccgccttcaacgcgtttacgatgcagctcgaccagtcgatagcgcggctggtcgccctgcaccagcagcatcaggcgtagatcggtaacatgttccagaaagcgattcatggcccgcccgctggcgaacagcaccagcataccaagatgctttttgctctcgacctgctcacggaaaaaagccgccatttcggcgatgtgctgctcttcgttatcaataagcggctcatagcgcatttgcggaataatgatttttccctgctcgacgtgattgaacggcgagtccagcgccacgaaacgatcgcccgctttctctttcagaccgctcatctcctgcagacgcgagaagctattcaacgaacgcagcgtcgccgaggtgacgacaatatgcggcacgctgcgccacagcagacgttcgagctgatcgctgacgcggatccccacgcagtggaaccagacatggatctggccatcgcgaatctcgcgggtggcccacttggtcaccggcgcgccggaagactgcgccattgaggccagccgccacagcttgctctgactttcgaacatgccaagtgcccggttcatctgcagcaggatacgatgcagacgcaccacgtcgtggctgccggtcttttcgctgagatcgttgagaaacagctccgccagcccgcgtagcatttcggtgagcttggccagccgctggcaaatctccatcacttcctgcggcagttcgcccatcgggaagcgatgctccgcctcctgggcggcaggcatatagagattgagaatattattgagcgaggcgataagctcatacagctcttcgcagtgttcatttaaccgttccggattggccaacggcggcgtggtcttcggacggaactgctccatgcaggtcgccaccaatttgctgaacagatccagctgcagccggtaccagggcgcggttatctccgcgctcatctctaaggcgtcgcgggcgacgtccggcagatggtggccttcgtcgagcaccagcagcaggtttttcggctctggcagcaccgcttcgctctccatggccgccatcaccaacgcatggttggccaccaccacttccgcttcctggatttcgcgccgggcgacgaagaatgggcattcacggtagtagtggcagttgcggttaagacagctggctttatcggtgctcagccgcccccacagggcgtcatcaatgggcttgtcggtatgatcgcgcaggccgtcccatttatagccgtcgagatcggttttcagcgtcgcgcagagcttttgttcggcctggttttttggcgtcagatcgtcatcgaggaacgccagcagatcctgctgcgtcgcctcggtactggccagcgccgccagattacgcggacaaacgtagcggccacggccaaaggcggcggtaaagcgcaggtcgggaataatcttgcgcagcagcggcaggtctttactgtagatttgatcctgcagcgcgacgttggcggtactgaccaccagcgttttttgttcctcacgggcaatggcgatgccggggatcagatatgacagcgttttgccgacgccggtcggcgcttcgatagccagatgccgcccctcttccccggcgagcgttttcgccacatcggcgatcatctgccgctgcggagctcgggggataaagtccgggatctgttcctgaagcgccttataccaggcggcgatttgcgctttaagcgcagcggtcaaagccatgagaaaacctgaatactgtataaacagccactattgtgccatttttgccggccaggaggtattgctttctgtagagggtggaatcgcgctcgataaaaaacgcaatgaacggtaaaaaaacggcccgccgccgcgcacgcggagagacgggccgtgatgatgcctgggcgctttatcgtcccaggcagcagcatattattcgccggcaggtttacgcgggcgacggcgacgcggtggtttaccgtcctgggtacgcgctttcggcgcttcgccatcctgacggcgcggcgcctgctggctacggccctggctctggccgccgcgtccttgcccctgaccgcggccaccgccgccacgctgctgacgaccattttgaatcggctccgctttaatcgacggatccggctcgtaaccggcaacagcaatacgcgggatctcttttttcagcaggcgttcaatatcacgcagcagcttatgctcgtccacgcagaccagcgacaacgcttcgccggtcgccgccgcgcgtccggtacggccaatccggtgcacgtaatcttccggcacattcggcagctcatagttgaccacgtgtggcagctcttcgatgtcgagcccgcgcgcggcgatgtcggtggcgaccagcacacgaatgccgccggatttaaagtcagccagcgcgcgggtacgcgctccctggctcttattgccgtggatggcggcgctacggataccgtctttattcagctgctccgccagatggttggcaccgtgcttggtacgggtaaagaccagcacctgctgccaattgccttcgccaatcagctgcgagagcagttcacgcttacgtttcttatccacaaagtgaacgtgctgggtgatctgctcagaggcggtgttgcggcgcgccacttcgacttccagcgggttatgcagcagtttttccgccagcgccttgatctcatcagagaaggtggcggagaacagcaggttttgacgacgcggcggcagtttagccagcacgcggcggatgtcgtggataaagcccatatccagcatgcgatcggcttcatccagtaccagcacttcgactttatccaggctgaccgcattctgatgttcaagatccagcagacggcctggggtggcgacgaggatatcgacgccgccgcgcagcttcatcatctgcgggttgatgctcacgcccccgaaaaccaccagcgagcggatattcagatatttgctgtagtcgcggacgttctcgcccacctgcgccgccagttcgcgggtcggcgtcaggatcagggcgcgcaccggacggcgccccttcgcgtgcggctgctcctgagtcaggcgctgcagcagcggcagcgtaaaaccggcggtcttgccggtcccggtctgggcgctggccattagatcgcggccctgcagtactgccgggatcgcctgctgctggataggggtcggctcaacgtagccctgctcggcgacggcgcgcaggatatcgggattcaggccaagggaatcaaaagacataacaactccgaaccgccccggcccgtttaagggcgtagttttcagggagattattgcgatagagatggcaaaaaccacaatgccatgaaggggcgcagtttagcagattttgtgacgaaccgcataaaatatccccgcaggaattaccagcaaaataatactcgcttgcgccgggtaatttttcgtcttcaccatggtggacagttcagcgaatcgcccctattcttaatcaatcgattgattaattttttagagtgcgatgaacagtacctccgtgaccagtaaaggcgaacaagccaaaagccagcttatcgccgccgccatcgcgcaattcggcgagtatggcctccatgcgacaacccgcgatatcgccgcgcaggccgggcaaaatatcgccgctatcacctattatttcggttcgaaagacgacctgtatctcgcctgcgcgcagtggatcgccgactgtatcggcgagaatttccgcccgcatgccgaagcggccgaagccctgttggcccagacgaaacctgacaaaccggcgctgcgggaattaattctgcgcagctgccgcgatatgagtctgctgctgacccaggacgacacggtcaacctcagcaaatttatctctcgcgagcagctctcccctacggcggcttaccagcttatccaccagcaggttatcgccccgctacatagctatttgacccggcttatcgccgcctggaccggacgtgatgctaacgatacgcagatgattctgcacacccacgccctgcttggcgaagtactggccttccgcctcgggcgggaaaccattttactgcgtaccggctgggcgcagttcgatcaacaaaaggctgaacaaatttttcaggtgatcacctgtcatatcgatttcattctgcaagggttagcgcaaaggagcctgggatcatgaaaaaacccgtcgtcgttctactggtcgtcatcgtgctcgccgcgctcggcggctggtggtggtatcaaagcagccaggcaaaagatctcactctctacggcaatgtcgatattcgcactgtgaatatgagcttccgcgtcggcgggcggctggcaactctgaacgtcgatgaaggcgatgaaattcgccgtgggcaaaccctcggcgaacttgaccgcgcgccatatgaaaacgcgctgcagcaggcgcaggccaacgtctccaccgcccaggcgcagtacgatttgatgatggcgggttaccgtgccgaagagattgcgcaggcggcggccgcggttaatcaggcgcaggccgcctgggtctatgcgcagaatttttatcaacgtcagctcggcctgcgcgccagcagcgcgatttccgccaacgacctcgaaaacgcccgttcttcacgcgatcaggcgcaggcgaccttaaaatcggcgcaggataaactgcgtcaatatcgcgccggtaaccgcccgcaggaaattgcccaggccaaagccagccttgaacaggcgcaggcggccctggcgcaagctaaactggacctgcatgataccgtactgaccgcgccatccgacggcaccttgatgacccgcgccgtagagcccggcaccatgttgaacgccggcggcacggtgttgacgctgtcattaacccatccggtttgggtacgcgcctacgttgacgagaaaaaccttggccaggcgcagccggggcgcgaagtactgctgtataccgatagccggccgaacaagccctatcatggtaaaatcggctttgtctcccccagcgccgaattcacgccgaagaccgtggaaacaccggatttgcgtaccgatctcgtctaccgcctgcgcatcgtggtgaacgacgccgacgccgcgctgcgtcagggcatgccggtgaccgtctccttcagcaacggaaacgggcatgagtaaggacgcgataactttaaccggactgacacgcggttttcccggtatggaccgacccgcggtcgcgccgctgaactgtacgattcactcaggctacgtcacagggctcgtcggcccagatggcgcaggtaaaacgacgctgatgcgaatgctggccggtttacttaagcctgatgagggcagcgccagcgtaatcggcttcgatccgctgaaggacgacggcgcgctgcacgcggcgctcggctatatgccgcagaaattcggcctgtatgaagatctgacggtgatggaaaacctgaacctgtacgccgatctgcgcagcgtcaccggcgaggcgcgcaagaaaatattcgagcgcctgctggaattcacatctcttggccctttcaccgggcgattagccggcaaactctccggcggcatgaaacaaaagctggggctcgcctgtacattggtgggcgatcctaaagtgctgttgttagatgagcccggcgtcggagtcgaccctatctcgcgccgcgagctgtggcagatggtgcacgaactggccggcgacggcatgctaattttgtggagcacctcttatctcgatgaagccgagcagtgccgcgatgtgctgctgatgaacgaaggtaaattgctttaccagggcgaaccgaaggcgctgacgcaaaccatggccgggcgcagctttctggtctccagcccgcaggaaaacaaccgccgcctgttgcagcgggcgctgaaactgccgcaaattagcgatggcgtgattcagggcaaatcggtgcgtttgatcctgaaaaaggcagcccgcattgatgaggttcagcaaaacggcaacatgccgccgctacaggtggccgaaactgcgccgcgttttgaagacgcctttatcgacctgttaggcggcgccggaaccgccgagtcgccgttaggagagattattcatcacgtggacggcaacaaagacgaaacggtcattgaagcacggtcgttaacgaaaaagtttggtgatttcgccgccaccgaccacgtcgatttccaggttaagcgcggtgagattttcggcctgcttggccctaacggcgccggcaaatccacgaccttcaaaatgatgtgcggcctgctggtgccgaccgacggaaaagcgctggtgctgggaatggatctcaatgttagctccggtaaagcgcgccagcatttgggctatatggcgcaaaaattctcgctgtacggcaacctcagcgtcgagcagaacctgcgttttttctccggcgtttacggcctacgcggccgggcgcaaaatgaaaaaatcgcgcgcatgagcgatgcctttggcctgaaaagtatcgccggccacgccgccgacgagctaccgctcggctacaagcagcggctggcgctggcctgctcgctgatgcatgaacccgacatcctgtttctcgatgaacccacctccggcgtcgacccgctcacccgccgcgagttctggctgcatatcaacagcatggtcgataaaggggtcacggtgatggtgactacccactttatggatgaggcggaatactgcgaccgcatcgggctggtctaccacggcaagcttatcgccagcggcacgccggacgcgctgaaggcgcaggcggcgaatgacagtcaggcggatcccactatggaacaggcgtttattaccctgattaaccaatgggacaaggaaaacggtcatgagcaatagcattctttcctggcgacgagtacgcgcgctgtgtgtcaaagagacccgacagatcgtccgcgatcccagcagttggctaattgcggtggtgatccccctgctcctgctgtttatcttcggctacggcataaacctcgactccagcaaactgcgagtcggcgtattgctggaacagcagagcgaagaggcgctggatttcgtccataccatgaccggctcgccctatatcgacgccaccgtcagcgataatcgccagcagttgattgagctgatgcaggccgggcgcatccgcgcgatggtcgtcattcccgtcgactttgaccgccagatggcccgcgccggcgccaatgcgccgattcagttaattaccgacggtagcgagccgaataccgctaacttcgcgcaggggtacgtcgaaggtatctggcagatctggcaacagcagcgggcggaagaccgcggtgagacctttgaaccgcttatcgatgtgcagatgcgctactggtttaacccggcggccatcagccagcactttattatccccggcgcaattaccatcatcatgaccgtggtcggcgcgatattgacctcgctggtggtagcgcgcgaatgggaacgcggcaccatggaagcgctgctatccactgaaatcacccgcgccgaactgctgctgtgcaagataattccctactatttcctcggcatgctggcgatgttgctgtgtatgctggtatcggtatttattctcggcgtgccctatcgcggctcgctgctgattctgtttgtcatcaccagcctgtttttgcttagtacgctgggaatggggttactgatctcgaccattacccgcaaccagtttaacgctgcgcaggtcgcgttgaacgccgcttttttaccatcgattatgttgtccgggtttattttccagatagacagtatgccggtggtgattcgcgcggtgacctacgtgatcccggcgcgttatttcgtcaacaccctgcaaagcctgtttctggcgggcaatattccggtggtgctgctggtgaacgtgctgtttttgattgcttcggcggtgatgtttatcggcttgacgtggctgaaaaccaaacggcgtctggattaaccctgcgctcgaatgttgcccggtggcgctacgcttaccgggcctacggtaagtttcggtcgcccgggtccgacatgaggaaggttctatgtttcatcgtttatggacattaatccgcaaagagctgcagtcgctgctgcgcgaaccgcaaacgcggatgattttaatcatgccggtgctgattcaggtattgttgtttccctttgccgccacgcttgaggtgaccaacgccaccatcgctatctataacgaagatagcggccgccacgcggtggagctcacccagcgctttgcccgcgccaaagcctttacccacgtcctgctgctgaaaagcccgcaggcgattcaaccgaccattgatgaacaaaaagctctgctcgtggtgcgcttcccggcggatttctcgcgtaatctcgacaactatcaaaccgccccgctacagctactgctcgacgggcgtaactccaacagcgcgcaaatcgccgctaactatctacagcagattgttaaaaactatcagcaggatctgctgcaggacaaagcgaaaccgaacaacagcgaactggtggtgcgcaactggtacaacccgaatctcgactataaatggttcgtggtgccgtcgcttatcgccatgatcaccaccatcggggtgatgatcgtcacctcgctgtcggtggctcgcgagcgtgaacagggtaccctcgatcagctgctggtctcaccgctcgccacctggcaaatcttcgttggcaaagcggtaccggcgctgatagtcgccacgatgcaggcgactatcgtgctggcgataggtatctgggcttatcagatcccgtttgccggctcgctgctgctgttctatttcaccatgctgatttacagtctatcgctggtgggctttggcttattgatttcttcgctgtgttcaacccagcagcaggcatttatcggcgtgttcgtctttatgatgccggcgattctgctatccggctacgtttcaccggtagaaaacatgccgcagtggctgcaggatttgacctggataaacccaattcggcactttaccgatatcaccaagcaaatttatctgaaggatgcgagtctgaagattgtgtggggaagtttgtggccgctattagtcatagcggccaccaccggctcagcggcgtatgcgatgttccgaagaaagattgcgtagctttttatctttcgccagcagcgataccaccgccgggcctgccagtatgaccagcccggcgagggccagcagcaggttgttgtgcagcacgcgcgacaacaaccagagcactatcatggcggcgccgaagtaccaggtcgtggtgagttcctcaaggaagtcccccacgtcgcgccagcgcgcttcatggtgacgctgcaaaaacagcatcgccagcagcgtgacgccgtacagtacgcacagccctaatccgacgcgcaccagcgcgccgctcagccaacccatcaccagtactgccacgaccagtagatgcaacataatctgccagcaactaagacccgttgcgacgcgtacacgttgttgccacttcatggcttctctcctgaaggatttttctctgttactcagagtaccgcactttacggaaaattccgtatcaccgcatctttttgtgacgtctactacactattttattcaggaaagtgacattaactggagaattatggctaagccaacgtcgcgaatttcggtgaacgtgctgacaattaacacccacaagggctttacgacgtttaatcggcgttttattttgcccgaattgcgcgaggccgttcgcagcgtcagcgccgacatagtttgtctacaggaagtgatgggtgcgcacgaagtgcaccctttgcatatcgaaaactggcctgataccacccattacgagtttcttgccgacaccatgtggagcgattacgcctacgggcgcaacgcggtctatccggaaggccatcacggcaatgccgtactgtcgcgctttcccattgaatactatgaaaatcgcgatatctcggtcggcaatggcgaaaaacgcggcctgctttactgtcgcatcgtacctccgcacagcgacatgacgatccacgttatctgcgtgcatctcggtcttcgcgcgcaccagcggcaggcacagttaacgatgctggcagagtgggtcaatacgctaccggcaggcgatccggtggtggtggcaggcgacttcaacgactggcgccagcaggctaatcagcccttaaaagcgcaggcagggcttgaggagatttttactcgcgcccgcgggcggccgctacgcacctttccggtcgctttcccgctgctgcgcctcgatcgtatttacgttaagaatgcacatgccagccatccgaaggcgctggcgcttaaacactggcggcatctgtccgatcatgcgcccctgagcgtggagatacatctgtgaaatgtcgctggcaggaaggcaatcgtattaccctactggagaatggcgaccagtattatccggcgttattcgccgccattggccgcgcgcagcgcaaggtgatccttgaatcctttatctggtttgaagacgaggtgggctggcgactgcatgcggtgctactgaaagccgcccgccggggtattcaggtggaagtgctgctcgacggctacggctcgccggacctcagcgatgagtttgtcggcgaactcaccgccgctggcgtggtcttccgctactacgatccgcgcccccggctaatgggtatgcgtaccaatttattccgccgcatgcatcgaaaaatcgtggtgattgacgacacaaccgcgtttgttggcggcattaactactctgccgagcacatgagcgattacggaccggaggcgaaacaggattatgccgtgcaggttgaagggccggtggtgctcgatattctccaattcgaactggagaacctgcccaccagcgaggctgcccgccgctggtggcgacgccgtcggcatctgccggaaattaaccaaacccctggcgaagcgcaggcgctgtttatctggcgcgataaccatgaacatcgtgacgatattgaacgtcactatctgaaaatgctgaccagcgcccgccgcgaggtcatcatcgccaacgcctatttctttcccggctaccgtctgctgcacgcgatgcgcaatgccgcgcggcgcggcgtacgggtgaagctgattgtccagggcgagccggacattccgattgttaagtttggcgcccacctgctgtaccactacctgattaaaggcggcgttcaggtgtatgaataccgccgccgtccgctgcatggcaaggttgcgctggcggacgaccactgggccaccgtcggttcaagtaatctcgacccgctgagtctgtcgctgaatctggaggccaacctgattatccacgaccgagagttcaatcagaccctgcgtgataacctcaacggccttatcgccagggactgccagcagatagataaatccatgctgccaaaacgtaactggtggcggctcggcgtcagcgtgctggctttccactttctgcgccacttccccgcctgggtcggttggctgccggcgcataccccgcagttagccagggtcagcccgccggtgcagccggaaattgaaacccaggatcgtgtagaaacgcaaaccagagacaatccgctatgagcaaatcgcatccccgctggcggatggcgaaaagagtgctgaccgcgctcttttttatcgccgtcatcgtattgctggtaatttatgcgcaaaaggtcgactggcaggatgtatggaaggtcatccgcggctacgatcgtctggcgctatttagcgccgttgggttggttatcgtcagctacctgatttatggctgctacgatctgctcgggcgagcctggtgcggccacaagctggcaaaaaaacaggtgatgctggtgtcgtttatctgctacgcctttaacctgacgctcagcacctgggtcggcgggatcgggatgcgctatcggttgtactcgcggctggggctgaacggcggcactattacccgtattttctcgcttagcattaccaccaactggttgggctatattctactgggcggcgtcattttcaccgcgaatctggtgacgttgccgccgcactggtacatcagtcaaaccacgctgcgtattattggcggcgttctgctgcttttaaccctgatctatcttttcggttgcgccttcgccaaacgccgccacatgacgattaagggacagcggttggtgctgccctcttttcgtttcgctctactacagatagggatttcagcggcgaactggatggtgatgggggcgattatctggctgctactgggcagcgagattaactattttctggtgctgggagtgctgctggtgagcagtatcgccggcgttatcgttcatattcccgccgggattggcgtgctggaggcggtgtttatcgccatgctctccggcgagtcgatttcgaagggggcgataattgccgctctgctggcgtggcgcgcgctgtactattttctgccgctgctgctggcgaccatcgcctatctggtgctggagagtcgggcgaaaaagctgcggcagaaaaacgagcgcaagctggcccgcggatgaaacggcccggttgcgcttaccgggcgatatttttgcggattgcctggattggtagcccggataaggcgcatcgcgccgctatccgggatgatattaacggcggttgccgaagatacgcagcagcatcaggaacaggttgatgaagtccagatacagcgttaaggctccgagaatcgagtatttacgcagcgtggcgctatcgcgggtatcaatctgctcgccgatgtttttcagcttctgggtgtcgtaggcggtcaggccaacaaacaccagcacaccaatgtaggttaccgcccacatcagcgcttcgctcttcagccacaggttaaccagcgacgccagcacgataccaatcagccccataaacagcatgctgccgaagccgctcagatcgcgcttagtggtgtaaccatagaggctcatcgccccgaacatcccgccggtcaccacaaaagtgctggcgatagacgaataggtataaacaataaagatgctcgctaacgttagccctgttaacgccgaataaagcataaacagcgtcgtcgccatacccgcgcttaagcgctgcaccatccccgagagcacaaacaccagcgccagttgggcgatgatcagcccgaagaaagtgattttgcttgaaaagacgaacatcatgaccgccggggtattcgccgcaaaccacgcgataaacgcggttaacaacaacccgaccgtcatccagccgtaaacctgcgccatgtaggtctgcaggccgctgcggctctgaacaatggaatcggaacgagggaatctgtccatgactatctcctgattaacaagtttctctcagtaagcgtatcacactaccagcgctctgccgcctgatgatcgctgtcgcgggcatcgacccagcgttcgccatccggcgtcgcctcgcgtttccagaacggcgcgcgggttttcaggtaatccatgatgaactcgccggcggcgaaggcgctgccgcggtgggcgctggtcacgccgacaaaaacaatctcttcgcccggccacatttcgccaatgcgatggataaccgtcacccggccaagcggccaacgttcccgcgcctgttcgacgatttccgccagcgatttctcggtcatgcccggatagtgctccagcgtcagcgctttcacgctgtcgccgagattgtgattacgcactttgccggtgaaggtgaccaccgcgccgtcttcatcccgctcggccagccacggatactcatcgccgacgcaaaagcgcgccgggcttaccacgatacgagtctgcgtcatcttagcccccggtgaccggcgggaaaaacgccacttcgtcgccgctcgcgaccggatggtcaaacgaggttagcgtctggttgaccgccgccagcaattttccttcttccagcgccagcgcccagcggtctccgcgcgcggcaagctgctgacgcacggcttcaacggttggcaattcgctggcgtcgagagtcagggtatcggtgccaaccagttcgcgcacctgggcaaaaaacaggacgttaatcatgggcttcctccaccttaaaatcgccggacttgccgccgcttttcgccagcagacgtaccgggccaataaccatatctttttgtaccgctttacacatatcgtagatggtcagcgcggcaaccgaggccgcggtcagcgcttccatttctacgccggttttaccggtcaggcggcagagtgactcaatgcgcacgcggttatgctccggctgcgcctgcaggttcacttctactttgctgagcatcagcggatgacacagcgggatcagctcccaggtacgtttcgcggcctgaatcccggcgatacgcgcggtggcgaatacatcgcctttatggtggctgccgtcgataatcatcgcaagcgttgcggcctgcatttcgacgtaagcctcagcgcgcgcttcgcgtaccgtttccgctttgccggagacgtcaaccatgtgggcttcgcccgcggcattaatgtgggtcagttgtgacataaactatttctttaaatgaggaatgaagttgcacgggcgagtgcgcgcatccagctgtggcgcgataatattttcccacgcggtggcgcaggccttggtcgagcccggcatcgcgaaaatcagcgtgcggttggcaacgccagcaacggcgcgggactgcagcgtcgaggtgcctatctcttcaaacgagagcatacggaacacttcgccaaaaccttcgacctcgcggtcaaacagcggcagcagcgcttccggcgcctgatcgccatcggtaaaaccggtaccaccggtgatcaacaccacctgcacctcatcgctggcaatccacgccgaaacctgggcgcgaatcgcgtagcggttctctttcacaatagccttatcgacgagggtatgtcccgcttcgtgcagcgcatcgcgcagccagtggccggaggtatcgtcctcttcgccgcggcggttggaaacggtaagaatagcaatacgggtcgggataaactcagcgctagcctggctcatctgaatgctcctttcgaaaacgattatccgccaatatacgacaggttctgcgtaataccggtgttgccctgatgcaggaaatgggtctgctttttatgggttaaggcttcggctatccgcgcttccagatcggcctgctgttcgtcctcggccatcaggtcgcgcaggtctacgccgccttcaccgaacagacacaggtgcagtttgccaacggatgagacgcgaagacggttacaggtggcgcagaagtctttttcatacggcatgatcaagccgatttcaccggcgtaatccgggtgacaaaagacctgtgccgggccatcgcttcgttgacggatctggtggatccaaccgcggcgcagcagttcatcgcgcagcaccatgccggaaatgtggtgacggcggaacaggtcgctgccctcgccggtttccattaattcaataaaacgcagctgaatacggcgaggtttgatccacgcgaggaaagtgtcgagctggtgatggttgacatcacgcatcagcacggtgttgaccttaaccttttcaaagccggcggcaaaggcagcgtcaataccgtccatcacctgctgaaatttatcctgaccggtgatggcatggaactggcgagcgtcgaggctatcgacgctgacgttaatcgccgtcagcccagcatcacgccagcgttcgacatcacgcgccaggcgataaccgttggtggtcaccgcgatctgacgaatcgcgctgttttcacgcacggcggcaataatctcggtaaagtcgcgacgtaacgagggttcgccgccggtgaggcggactttttccgtgccaagggcggaaaaagcgcgcgtcacgcggcgcacttcgtctacgctaagaaaacccttgttggtcacggcgccgggcttgtagccgtccggcaggcagtaggtgcaacgaaagttacacacgtcggtaatcgacaggcgcaagtaataaaacttacgcgcaaatgcatcagtaagctgtgaggccatatacacctttccaagtacgggaggcgcggtcatttctttccacgccctggcgacagcgcagctgccgcggccagagcaccatatcttgcgacacaggtaccaaggctagagtgttagttggttatgccgatagtagcgctttaacgatggtttcgccattttcattttcgctatataatcatctatatatcgctaatatcttgcattttcagtacagaatagccaaaaatcacactttaacattgatatcggtcagtttgacggaaaccgggcattatcttttaggggtagatcggagacgctaaacccgaacattgaacagaaggaattcgtatgcgcaatcgcactttcgccgatctggaccgcgtcgtcgcccttggcggaggccacggtttggggcgggtgatgtcgtcgctctcgtcgctcggctcacgcctgaccggcatcgtgaccaccaccgataacggcggatcaacggggcgaattcgccgctcggaaggggggatcgcctggggcgatatgcgcaactgcattaatcaattaatcgccgaacccagcgtcgcttccgcgatgtttgaatatcgttttggcggcaatggcgagctttccgggcataacctcggaaatctgatgttaaaggcgctggatcacctgagcgtgcggcctttagaggcgatcaatttgatcagaaatctgcttaaagtggatgctttcctgattccgatgtcggagcaaccggtcgatctggtggcgctcgatcatgaaggccatgaagtgtatggcgaagtgaatatcgatcagctggatcacgtcccgcaggaactgatgctcagcccaccggttccggcgactcgcgaagcggttgaggccatcgccgaggccgatctgatcctgattgggccagggagcttctacaccagcctgctgcccattttactgctcgacgaaatggcccaggcgctgcggcggaccccggcgcccatggtgtttatcgataacctgggtaaggaacatagcccagccgccaatctaacgctggcggacaggatgactattctggaacattacgtcggcaaaaaagtgattgatgccgccatcgtcgggccgaaagccgatgttaagggtatggaagaacgactggtgattcagaccgcgctggacgccagcgatgtcacctatcgtcatgaccgcgtgctgctacgccaggcgctggagcaggctattcaggcattaggttaatcctcaagcggcactatttttaaacaagatgacgcttcagattaaaatcttaaggttgtcttaaaatatcgctgtcaacataacgaacatctcctactacgggtattcgttatgtcgtttatttctttacgtcggccggtactcagccgcacggcttatttgactctctttgcctgttatatcggtatctttcttaacctggccttttatcgccaggttttcccgctactgccggtaaacaatctccataactggctggttttccttagcatgccgatcgtggcaattagcgtgatgaacatcatcaccaccctcgcctcgttcttaaagctcgaccgggtagtcatcagcctgtttattctgctgagcgcctcggcgcagtactttatctggaccttcggcgtggtgatcgaccgttcgatgatcgccaatatcttcgatacgacacctgcggaaagttttgccctgctgtcgacgcaaatggtcatcgtgctgggtctctccgggctattgatggttctggtcgcctggtggattaaagttcgcagaccggcctctttctggcgcggtgcggcgatgcgcctgctcaatatcgccgtttcagcgctgctcattgtgctggtggcggcgctgttctacaaagattacgcctcggtgttccgtaacaataaggagctggtgaaatcattgagtccatccaacagcattgtggcgctgaactcgtggtatgcgcataaccggatggataacctgccgctggtgaagatcggcgaagatgccaaacagaaagcggtgatgcataacggcccgcgtaaaaatctgaccatcgtggtgctgggcgaaacctcgcgcgccgagaatttctcgctgggcggctacgatcgagaaactaacccgcgcctgaagcaggacgacgtggtgtacttcccgaaaaccacctcctgcggcaccgcaaccgcggtttccgtcccctgcatgttctccaatatgccgcgcgcgcattacgatgaagaactggcgcaccatcaggaaggcgttctggatattttgcagcgcgccggtgttcaggtgctatggaacgacaacgatggcggctgtaaaggcgcctgtgaccgcgtgccgcatcagaacgtcaccaacctgaacctcagcggcgagtgcattgatggcgagtgctacgatgacgtgctgttccataatcttgatagctatatcgataatttacagcaggatggcattatcgttctgcacaccattggtagtcatggcccgacctattacaatcgctacccggctgaattcaaaaaattcaccccgacctgcgataccaatgaaatccaaagttgtacgcaacaacagttgaccaatacctacgacaacaccattttatacgtcgactatgtggttgataaagcgataaaattactgcagtccaaacaggataaattcaccaccagtctggtgtatttgtctgaccacggcgaatcgctgggtgaagatggcgtgtatctgcatggcctgccgtactccatagcgccggatacgcaaaaacacgtgccgatgctgctgtggttgtcgccggattatcagcaacgctatggcgtatccagccagtgtttgcaacagcaggcgaagacgaacgattattcacaagataatctgttctctaccctgcttggcctgctcggggtagacagccgcgagtatcaggcaaaagacgaccttttaacgccatgtagagagaccggcagatgaaaatcttagtcattgaagacgatgcgctcctgttacaagggttaattctggccatgcaaagcgaaggctatgtctgcgatggcgtcgccaccgcgcatgaagccgcgctgtcgttagccagcaaccattacagtctggtggtgctcgacctgagcctgccggatgaagacggtctgcatttcctggcgcgtatgcgccgggagaaattcacccaaccggtgttaatcctcaccgcccgcgataccgtgggcgaccgcatcagcgggctggataccggcgctgacgattacctggtgaaacctttcgcgcttgaagagctcaacgcccgcattcgcgcgctgctgcgtcgccataataatcagggcgataatgagctgaccgtcggcaacctgcgccttaatgttacccgtcgtcaggtgtggctggccggcgaatcgctggagctgacgccaaaagagtatgctctgctctcgcgcctgatgatgaaggccggcagcccggtacatcgcgaaattctctacaatgatatctacagctgggataacgaaccggccaccaataccctcgaagtacatatccataatctgcgcgacaagattggtaaagcgcggatccgcaccgtccgcggctttggctacatgctggtgaataatacggagtcagaataacgctatggcactgtttgcgaccgaaacctggaccatgcgccaccgcctgctactgaccatcggcgcgattctggtggtctgccagctgatcagcgtattttggctatggcatgagagcaaagagcaaatccagctgctggttgccagcgccattgagggtcataacaatcaaaggcacgtcgaacatgaggtacgcgaagcggtcgccagcctgctggtgccaagcctgctgatcatcggtctggcgctatatatcagcctgatggcggtgaagaaaatcacccgtccgctatcaaatctgcaaagcgagctggaaagccggacgccggataatctgcaacccattattttgcaggagtcggtgccggaagtgaccgcagtgaccttggcgattaatcaactggtgtcgcggctgaccctgacgctcgaacgggagcgtctgtttaccgccgacgtcgcccacgaactgcgtacccctcttgccgggctgcgcttgcatctggagctgctggcaaaggtacacggcgtcagcgttgatcccttaattcaacgtctcgatcagatgaccaacagcatttcgcagctgctacaactggcgcgcgtcgggcagtcgttttccgccgggagttaccagcaggtgcatttgcacgaagatgtggtggagcctctgcaggatgagttggcaacgatgctcgaagcgcgccaacagaccctggagatagaaagcggcgcaggcgaggatctcatttccggagatgcgaccctggcgcgggtgattttacgcaatctggtggagaatgcgcaccgctatagccccgtggggtcgaagattaagatttcggtaaaaccgggaaatacgccgattctggcagtagaagatgaagggccgggcattgatgaggccaaaagcggcgagctgagtaaagcgtttgtccgcatggacagccgctatggcggaataggcctcggtttaagcattgtcacccgcatcgctcaactacacgatgcgcaattctttttacataaccgccagcccggaccgggcgtccgcgcctgggtgctatttccgcgcagcgcgcgtcagaaggttaatacccattgatgtaagaaggcgaccacaatcacaaaggcggtggcaatggccagatattcacggttggtcagtttttgcatggcgctatcctcattaaactgaggatagtgtcgctgaagaaaattaagccaacattaagatcctacgataatagcgtgacggcaattgcaaattgcgcattgccgtcatttttgcacggctcccctatcacccttatgatgccgcaataaacagttcgcgtagctgatgcaattgatcgcggatctgcgcggcctcttcgaactcaaggttctgggcatgctgcatcatttgcccttccagctcgtggatcttctgctgcagcgctttcggcgtcagttcgacgctatcggcttccaccggagaacgggctttgccacggcctttggctttggtcttcgctatgttctgacccagcgccagaatatcgaccactttcttattaagaccctgcggcacaataccgtgctcttcgttataacgctgctgcttctcgcggcggcgttcggtttcaccgatcgccttcgccatcgatggcgtgattttatcgccgtaaagaatcgccttaccgttcacgttacgcgccgcgcggccgatggtctggataagcgagcgctcggaacgcaggaagccctctttatcggcatcaagtatcgccaccaacgatacttccggcatatccagcccttcgcgcagcaggttgatacccaccagcacgtcgaactcgccaagacgcagatcgcgaataatttccatacgctcgacggtatcgatatcggagtgcagatagcgcacccgttcaccgtgctcttccaggtattcggttaaatcctccgccatgcgtttggtcagcgtcgtcaccagtacacgctcattgatcgccgcacgggtacggatttctgataacagatcgtcgacctgcgtcgccaccggccgcacttcgataaccggatccagtaggcccgttgggcgaacgacctggtctaccacctcatcgccggatttttccagctcatagggacccggcgtcgctgaaacgtagatggtctgcggcgccagcgcttcaaactcttcgaacttcatcggccggttatccagcgctgacggcaggcgaaagccatattccaccagcgtctctttacgcgcccggtcgccacggtacataccgccgatttgcgggatagtcacgtgcgattcatcgataaccagcaggccatccgccggcaggtagtcgaacagcgtcggcggcggctcgcccggcccgcgcccggagagaaagcgcgagtagttttcaatccccgagcagtagcccagctcgttcatcatttcgaggtcgaactgagtgcgctggctcagccgctgctcttcaagcagtttattgttcgccagcaggaccttgcggcggtcagccagctcgtctttgatctcttccatcgcctgtacgatacgctcgcgcggcgtaacgtagtgggtcttcggatagatggtatagcgtggaatggacgattcgacgtggccggtcagcgggtcaaacagcgatagccgctcgacctcttcgtcaaacagttcaatacgcagcgcgatatcatcggattccgccgggaaaacatcgataacctcgccgcggacgcggaaagtgccgcgctggaaggcctgatcgttgcgggtgtattgcagttccgccagccgacgcaggatcgcccgctggtcgatcagcatgccggtggtcaggtgcagcatcatctttagatacagatccgggtcgccaagaccgtagatggcggaaaccgaagccaccaccactacatcgcgccgttcgagcaacgctttggtggccgacagacgcatctgctcaatgtgttcgttcaccgaggcgtctttttcgataaaggtatccgagctcggtacgtaggcttcaggctggtaataatcgtagtaggagacaaaatactccaccgcattctcgggaaagaactctttcatctcgccatacagctgcgccgccagggttttgttcggcgccagcaccatcgtcgggcgctgtaagtcagcgataacgttggcgatggtgaaggttttccccgaaccggttaccccaagcagggtttgatgcgcaaggccatcttccagcccctcttccagacggcggatggcttcgggctgatcgccggaaggacggaatgcggagtgcagcttgaatggtttgctcatatttcaggacctgaagatgggattggccagcaggtgtttaattctacccttcagtttcatttttgccaataaataatactggatataaaaacagtatcgcattattgtatggcggcaaaaggacgcgcggtcgtccgactgcgggcgtaaaatgcgcgctttgcggaataatccaccagcctgtgtggttatccccagaaacatttatcatttaacatttgtcaagcaaggtaatgaatcttttatggcagccggtgacacttttctgacagccattgcttttatttaacttgctgaaataaaacataatttaccaaaagacgggtttcgcgccaatttgctcgcaggccgcgtactctctagcttaccgcaagttttctaactctaatacacaaggttatccacaggaatagtggataactgcctgcaggccgcgaggtctgccacccggcagaaaagtctcatcggaccaaagcccgtggctaaaaaaaattatcgaattttttttgatatttatcagctaaagacggctggattttttgcgttttctggaccacatttcatcgtcctgtcaacaaaaaatagagccgtctcgcaggtttattgcaggggggtcagatccaggtactgcgcgagatcctgacgctgagatgcgtcggcaagccagggaatttcccccagcagcggcgctggcaatacccgcgttaaggtttgcagatattcgcgatggcgtttacccggtggctggatatcgttggcgatccagcccacgagcggcagcccggcttcgcgtaccgccagggcagtgagcatcgcgtgattgatacagccaagtttgacgccgaccactaaaatcaccggcaattgctcctgctgcgcccagtcggcgaaggtcagggtttccgagagcggcgtaaaccagccgcccgccccttccaccagcacccagtcggccaggcgctccagttcgcgtaaaccgctggaaagcgtcgtcgcggcaatcggtctcccttcatcggcgctaataatatgcggcgaggtcggctcggcaaaagtataagggttaacctgttcatagcgcagcgccaccaggctattacgctgcagggccagcgcatcttcattgcgtaacccttgtgcggtcaggtcgctcccggaagccaccggcttatagcctgcggtgttaaatcccagctgattcgccgcctgcagcagcgcgctgctggcgacggttttaccgacttcagtatcggttccggtgacgaagaaacatttagtcacgttcaatgactcctgtaaaaagatgatacgtcagcgggcactggccctgctgttgcggccaggccagttgcagttcacgcagcttgccgcggctaagcagagcagacgtccgcccctgatgtaagtgggtagccccaatcccctttagcgagcgcatggcgcttaacgcgtcggcgaacggtaagctaatctgatgcacgacgccttcggcgcgcaggccactcagagccgcccttaccgcctgttcgctgagaaaacggttggcatggggatgttcgtcgaccgcccgccacgcttgattgagctccggtagcgatccggcgagcaacgtagtgaacgccacccgtccgccgggccgcaccacccggcacagttcgccgattgccgcccgtagatcgtcacaccactgcaccgccaggttactccatgccaggtcgaagcaggcatccggcagcggcagcgcttcgatatctccctgtagataatgctgcgcggcgccgttgcgttgcgcctgcgccaacatcccggcggagagatccagcgcggtaacttcgcttcctgcttcgcgccagtgccggctcatactgccgggcccgcagccggcatcgagcaccagggggaaatcacctttcgccaactggcgcagcagcaattcggcgctacggcgctgcagctcattatgttgcgtatagccgctggccgcccgaccaaacgccgccgccacagcctgcttattcaccgtggccatgcagcacctccagtaaacgcgcaatgtcctcggcctgatgagcggcagtcagagtcaggcgcagacgcgcgccgccggcgggaaccgtcggcggacgaatggcggtagcccaacagccggcctcgcgtaggctggaggccagagcaagcgctcgcgcgttatcgccaacgatcagcggctgaatcgcgctccgggaatcggtcagccccagcgaaacatcgcccattcctgcgcggaactgacggatgcgggcggtcagggtttcccgccgctgctggccctcatcgctacaaatgatccgcaacgccgcgctcagcgctaccgcctgcgccggcggcatcgcggtgctgtagatgagatgacgggcaaactgcagcagataatcggccatcgattcactgcacagtaccgccgcgccgcttaccccaaacgccttgccgaaggtgactaccagcagctccgggcgaaccgcctgcgtatgacagcttccgcgcccttcatcgccaatcgtcccgattccgtgagcatcatcaaccagtaataatgcgccggcgctgcgggctgccgcctgaatgtcagccagcggcgcgctatcgccgtccatactgaaaatcccttcggtaacgactaactgctggccgtccagcggtttcgccagcagttgagcaagctgttgcgggtcattgtgggtaaagcggcgcagctgcgccgggctgaggcttgccgcctccagcagggaggcatggctcaggcgatcggccacaatgcgatcgtctttttccgccagcgcggcaatcaacgcctgattggcggcaaagccggagataaacagcaacgcgcgcggatagcccagccagtcggcaagttcctcttccagcgcgcgatgcgcctcactatagccgctaacgtggcccgatccgccggaaccgacgccataacgttccgccccctgctgccaggcggcgataatcgcgccatgctggctcaggcccaggtagtcattactggagaagttgagccagcgctccccttcacgctccagccagcgtccggcgccgtggcttaccggcaggcggcggcgaaaagcctccgccgcccgccgttcgtccagcgcccgatcgattcgttgctgccagctcatagcgccgccgcgttgtagtattcctcagtgtccggggtgagtaaggcctgctccaggcgctgctgctgctcattatcgccttccagcaccgccgtctgctgcgggttgatgcccagtttgcggaacagctgcaggtctttatcttcttccgggtttggcgtcgtcagtagcttgcagccatagaaaatcgagttcgccccggccataaagcacatcgcctgggtctgctcgttcatctgctcgcgcccggcggagagacgcacgtaggaggttggcatcatgatgcgcgcaatggcgatcgtgcggatgaaatcgaaagcgtcaacatcgtcgttatccgccagcggcgtacctttgaccttcaccagcatgttgatcggcacgctttccggcggcgttggcaaattggccaactgcagcagcagcccggcgcgatcgttcacgctttcccccaacccgacgatcccaccggagcacactttaatcccggcatcgcgtaccttatccagcgtatccagacgttcctgataggtacgggtggtgatgatgttgccgtaaaattccggcgaggtgtcgaggttatggttgtagtaatccagccccgcgccggccaggcgctgcgcctggctatcggtaagggtgccgagcgtcatacaggactccaaccccagcgccttgacgcctttcaccatctgctccagatacggcatatcgcgatcattagggttcttccacgctgcgcccatgcagaagcgggtcgagccggcgtttttcgcctgacgcgctgattccagcacctgctcgacttccatcaggcgctcggattcaaggccggttttgtagcgtgcgctttgcgggcaatatttacagtcttccggacaagcgccggttttaatcgacagcaacgtactgacctgcacctgacgcgggtcaaaatgctggcggtggatttgctgcgcttcaaagagcagatcgatgagtggtttgttaaataattcagttacttgcgacattgtccagcgtgcgtggtgagccattggcctctccaaaaggttttgttaatttgcggttcggtttatactcgtaaacctaaatgtttttaaaatggtttacaagtcgcttatgacactggacgatctcgctttcgatcggcgccacatctggcacccctacacctctatgacttcccccctgccggtctacccggtggtttccgcccacggttgcgagctgtccctcgccggcggcgaacaactgattgacggcatgtcctcctggtgggcggcgatccacggctacaatcacccgcgcctgaatgcggcgatgaaagcgcagatcgaccagatgtcgcacgtgatgttcggcgggatcacccatccgtcggcggtggcgctctgtcgccaactggtggcgatgacgccggaatcgctggagtgcgttttcctcgccgattccggttcggtggcggtagaagtggcgatgaaaatggcgctgcagtactggcaggctaagggccagccgcgccgtcgtttcctgaccttccgcaacggctatcacggcgacaccttcggtgcgatgtcggtctgcgatccgcagaattcaatgcacagcctgtggcagggctacctgccggataacctgtttgcccccgcgccgcaaagccgcttcgacggcgagtgggacgagatggatatggtgccgtttgcccgcctgatggccgcgcatcgccacgaaatcgccgcggtgatcctcgaaccggtagtccagggcgctggcgggatgcgcatgtaccatccagagtggctaaagcgagtgcgtaaaatgtgcgaccgggaagggattttgctgatcgccgatgagattgccaccggctttggccgtaccggcaaactgttcgcctgcgagcatgccggtatctccgccgatattctttgtctgggtaaagcgctgaccggcggtaccatgaccctttctgccgctatcactacccgaacggtagctgaaaccatcagcaatggcgaagccggctgctttatgcacggccccacctttatgggtaatccgctggcctgcgcggtggcaagcgaaagcctgcgcctgctggagagcggcgaatggcaacagcaggtagcggcgattgaagcccagctgaaggccgagctggctccggcacgagagtcagaatgggtcgccgacgtgcgcgtactcggcgcgattggcgtggttgaaacccgtcagccggtgaacatggccgctctgcagcgctttttcgttgagcaaggggtatggatccgcccgtttggccggctgatttatctgatgccaccgtacatcatcagcccacaacagctgactcgcctgacccgtgcggtcaatatggcggtacaagaagaaacattttttagcgaataaacagcggaattgcgccgtcgggaaagctacacttctttgttaatcagcgcattatcaatgaggatgaagcatgaaactgaccagtcacgatctgcaagacggcggcaagctgcctaatcgtcacgtattcaacggtatggggtacgatggcgataatctttcgccgcatctgatgtgggacgacgttcccgcaggaaccaaaagctttgtcgtcacctgctacgacccggatgcgccgaccggctccggctggtggcactgggtggtagccaacctgcctgccgatacccgggttttaccgcagggggccggttccggtcaggcggagctaccagaagaggccattcagacccgcaccgattttggtaaggccggctacggcggcgcggcgccgccgaagggggaaacccaccgctacatttttaccgtacacgcgttggatatcgataagattgatatcgacgccgaggcgagcggcgcgatggtcggctttaatgtccatttccattcgctcgccagcgcttccatcaccgccctgttcagttaattatccccccggatagcggcttgcgccttatccgggcaacccgcggcaccggtatattgtcgggtggcgctgcgcttacccgacctacggtccgtgcggcctgcctttaatttattcaccatgctggctgaaactgccgttgttggcggcctcaaaatcgctgagacgttcccggaaggccggggcagcccgcatggatgcgggctgagggccgtgttttgcaaggacgctgcctcggcccgacccgaagcctgcagggataagtcgaaggtacccgaagtggcgattttggcggccgagcccgggggtacagggggcggcggcgactggccgccccctgtgcgctccctgcgccatgagggacataacgcagaagaaatattgggagcgcaatgtgtcagaattaacacaaagcacatgttttccccgaccaaaaccgttgcaaaccgataacagtatctacggtccaaacgtagccccggtaagcgcagcgccaccggggagattgaccttactgttccgtggccacctgcagcgcggttttacgcacgcgtgcataccacaccaccgtcagcagccccagccagaccagcccggctaacagcgccacgcgcgtctcttccaccattcccagcacggcgatcaccagccccataaacagtagcgtcaacagcgggccaaccggccagaaggggatcgggaattcgatcttactgcgctcttcggccgacaaaccgcggcgcatcgagaaatgagagagcaggatcatcaaccacacccagacggtggcgaacgccgccagcgaggcaatcaggacaaagacctgttccggcatcagatagttaagcaccaccgccaccagcagcgccacgcccatcaccacgaccgtcatccagggtacgccgttgctggcgatccgctggaagcacttcggcgcaagcccctcttttgacataccgtacatcatgcgcccggcgccaaaaatatcgctgttaatcgccgagatactggcgctaatcacgatgatattcagcacggtcgccgccgccgggatcccgaggccatcaaagatcagcacaaacggactgccctgctcaccaaaactattccacgggaagatcgccatcagcaccgccagggtgcagacgtaaaacagaataatacgcagcggaatggtgttgatggcctgcgggatgaccttcttcgggttctgcgcttccgccgccgtgacgccgataatctctacaccgccgaaagcgaacatcacgatgccaagcgaggcgatgatcccctgccagccatttggcgcaaagccgccgtggctccacagattttccagcccagtggccgggaaactatggccaaagccaaagaaaataatccccgcgcccgccgccatcatagcgataatcgccaccactttaatcagcgacagccagaactccatctcgccgaacacccgcacgttgcacaggttcatcgcgccaataaagaagatgatgctgaggatccagatccagcgcggcacatcggggtaccacaaccccatatagataccgaatgcggtgacgtcggccagcgccacgatcaccatttcaaaggtgtaggtccagccggtaataaatccggccagcggcccgagatactggcgagcgtagctgccgaaggagccggaaaccggattgcgcaccgccatttcgcccagcgcgcgcatgaccataaagaccgccgcgccgccgatcagataggccagcagcaccgccggacccgccgccttaatggcggaggccgaaccgtagaacagcccggtgccgatagcggaaccgagcgcaataaaacgaatgtgtcgggcattcagcccgcgcagcagatgcggtttgtgttgttgttgcatatacaggtgtcctggtttttttatatgacgacaaatatgcgatgtaggacggccggggggatgacatccccccgacgcgggtacagagaacaacggtgattaattcaggccaggcaatacggcaggcagcagacgcgtcaggtgacgtgcggccaaaagctcggtggcattttcaatatcaggagcgaagaaacggtcttgggtataatgcggcacgcgttcgcgcagcagatgacgcgcctcttccagcagcggactggtggtcagcccttcgcgcatatccagcccctgcgccgccgccagccactcaactgccagcaccccgcgggtgttttccgccatcgcccacaggcgacgaccggcagccggcgccatcgagacgtggtcttcctggttcgcggaggtgggcaggctgtcaacgctatgcgggtgcgacagcgctttgttttcactggctaaagccgccgccgtgacctgggctatcataaagccggagttgacgccgccatttttcacgaggaacggcggcagctgcgacatatggctgtccatcatcagcgcgatacgacgctcggagagcgagccgatttccgcgatcgccagtgcgatattatccgccgccatcgctaccggttcggcatggaagttaccgccggagatgacgtcattttcggcggcaaagaccagcgggttatcggagaccgcgttcgcttcggctaacagtacttccgccgcctggcggatctgcgtcaggcaggcgcccatcacctgcggctgacagcgcagagagtacggatcctgcaccttggcgcagttatggtgcgactgcgaaatcgcgctgtcatcggtcaacaggtggcgatacagagccgccgcatcaatctggccacgctggccgcgcacctcgtgaatacgcgcatcgaacggacgacgcgaacccagcgccgcttcggtggttaacgccccgcaaacgaccgcggaggcgaacagatcctcggcttcgaacaggccgcgcagcgcaaaggccgtcgacgcctgggtgccgttcagcagcgccagaccttctttcgccgccagggtaatcggctccagccccgcctgacgtaacgcttccgtcgccggcaaccattcgccgccgcgtacccgcgctttgccttcgccaagcagcgtcagcgacatatgcgccagcggcgcgaggtcgccggaggcgccgacggaacctttcgccgggatccacggcgtcacgccggcattgaccaggccaatcagcgcctggatcacgctcaggcggatcccggagaaaccgcgggacaggctgttaatcttcagcaccataatcaggcgcgccaggtcatcatccagcggctcgccaacgcctgccgcatgggatagcaccagcgaacgctgcaggttctccagatcttccgtcgagatacgggtctgggccagcaggccaaaaccggtgttgataccgtaggcggtccgcccttcggcgaggatggcgttaacgcaggccacgctctcatcaattgccgcaaacgcgctgctatcaagggtaatgttcagcgggtggctgtaaacgtcgcggagctgcgacaggctcagttgccccggaattagcgttaaagatttcatttagcgttcccctgcgttgccgcaaccatcggaagattcagaccctgttccgccgcgcattcaatggcgatatcgtaacccgcgtcggcatgacgcattacgccggtcgctgggtcgttatgcaggacgcgagcgatacgcgccgccgcttcatcggtaccatcacagacgataaccatcccggagtgctgcgagaagcccatgcctacgccgccgccgtggtgcagcgacacccaggtcgcgccgctggcggtgttaagcagtgcgttgagcaacggccagtcagataccgcatccgagccgtcgcgcatggcttcggtttcgcggttcgggctggcgacggaaccggaatcaaggtgatcgcggccaatcacgatcggcgcagagacttcgccgctacgcaccatttcgttaaaggccagccccagcttctgccgccactccagacctacccagcagatacgcgccggcagtccctggaagctgatacgctcgcgcgccatatccagccagtggtgcagatgcttatcatctttaatgatctctttcactttcgcgtcggttttgtagatatcctgcggatcgccggacagcgctacccaacggaacgggccgataccgcggcagaacagcgggcggatatacgccggcacgaagcccgggaaatcgaaggcgttgctgacgcccatttcctgcgccatctggcggatgttgttgccgtagtcgaaggtcggtacgcccatttcattaaaggccagcatcgcctgaacgtggtcggccatcgagcgtttcgccgccagaatagtgccctgcggatcggattcggctttctgctgatactcctcccagctccagcctttcggcagatagccgtgcagcgggtcgtgggcgctggtctggtcggtgaccatatccgggcgcacgccgcgtttcaccagttccggaacgatatccgcggcgttgccgcacagggcgatagagatggcgcggccttcggcggtgtattttttgatgcgcgccagggcgtcatccagagaagtggcctgttcatccacgtagcgggtacgcagacggaaatcgatgcggctctgctggcattcaatgttcagcgagcaggcgcctgccagcgtcgcggccagcggctgcgcgccgcccatgccgcccagaccggcggttaacacccagcggcctttcaggctgccctgatagtgctggcgaccggcttcgacgaaagtttcgtaggtgccctgcacgatgccctggctaccgatataaatccagctgccggcggtcatctggccgtacatcgccaaccctttggcatccagttcgttgaagtgttcccaggtggcccagtgcgggaccaggttggagttagcgatcagcacgcgcggcgagttttcatgcgttttaaatacgccgaccggtttgccggactgcaccagcagggtctcgtcgctttccaggtttttcagcgccttcacgatagcgtcatagcattcccagttgcgcgcagcgcgaccgataccgccatagaccaccagctcatgcgggttttcggcgacatcgggatcgaggttgttcattaacatacgcagcggcgcttcggtcaaccagctcttggcggtaagcgtcgtgcctctcggggcacgtacgtccagctggcgatatttgctttgcgacatcggggtttctcctgacaattaacgttgtgtacgtagatacatatacttgtctatacaactctacgcaagccaggatttaacagaaatgatacaattttgttatattgcgtcagcaatcacgttttgctgacgccagggagaattacgagctgaaatggccctgcagacggtagcgcgcgccggggaacagcaggcgagcgtgtgagacaatatgcgtcgtcgaccaggtgcggcggcgaataagcaggcagggatcgtgcggcaggatgcgcagcagcgcgcactcttctgacgtcgcctgcaccgcctcgacgatatgttcgccttcggttaacggcgcaatcagcgacagataatcatgcggcgtggtggcggtgtaatcctgtaatagatagtctggcaccaccgcggcattgacgcagcgatcttcgatttgtaccgggacctcgttttcaaaatgcaccatcagcgaatgaaagatacgcgtgccttcggcgacgttgagcgcctccgcctggataacatccgcttcggtctcctctaaaagcagcacctcacagcggtgctggtgacggcgggaggcaatctcatcggctatgctgcgcacttcaaatagcgccgactgccctttcggctcagcgacgaaggtaccgactccctgtagcctcaccagcaagccttcatccgtcagctctcgcagcgcgcggttgatggtcattcggctgaagccgaactgggcgaccagttcagcctccgagggaattcggtcgtgcggacgccactcgccgcggtggatcttttcgctgatcgcctgcttcaccttttcatagaaaggcgcgggcgcggaacgaggttgttgtgcaaacatggcctggctttccttatgcgtaataagcggagcggcgaaacgaaaataatagcgcggatcgctagcgccaccaatgggcgatttgccatgccagacgggccgccgcgcgggcgccctgtccgtcgatgtcaaattgcggattaaactcgaccaaatccaccgcctgtagcttaccgctgcggcacaacggctcaacgatccgcagcagggtcgccagcggcacgcccagcgccgccggcgcggaaaccgccggcatttcgcgcgccggcagcacgtcgagatcgatagtcagatacagacggtcgaattgcgcgatattgcgctcaagctccggcaacaagcgtgtttcgaaggctgccagcacctccagatcttcaacgatagccacctggcggcgcgccgcttcatcccataacgcctgggtgttcgccgcccggctgacgccaatgcaggtatagtgaaaacctcgctgctgcgcttcacactccagcgccagctggcggaatggcgtcccggaactggcgcattcggcaaagcgtaaatccagatgcgcatcgagattaataatgcccactttttcgcccgggaaggcatccagtaccccagcgccgtggccgaaggccgtctcgtgaccgccgcccagcaccagcgtgcgtttgccggcgcgttgacaggcggccaccgcctcgcgtagcgcctggtgcgcggcttctaactgttcaccgtcgacgctaatcgtgcccatatccacgcagcggtcatggccctgatggctggccatattggccaacgcccggcgtagcgtttccgggccatctccggcgccggtgcgccctttattacgccgtacgccttcgtcgcaggcgaagccgagcagcgcgatatcgccgggcatctcctgcggcgcgaagcgttccgcgcgggcgatggtctggaacaggcgcagcgcattaggcgcttccgcgctatcatcacgcccctgccaaaggttggcgggcgtagcttgccacagcatcattgcagttctcctcgtaccacgcgcccccagagcggcgcgcgccccggctcatacaccatctcgaccgggtgctcggcatcccagatagcgaagtttgcgacaaagcccgccgccagctgaccatggctctcctgtcgccccagcgcccgcgcggcatggcgagtcaccccggcccaggcctcttccggcgttaaaccaaacttgacgcaggccatgttcatcgccagatgcaggctagcgaaggggctggtgcccgggttgaaatcggtcgccaccgccatcggcacctggtacttgcgcagcagttccaccggcggtttgcgggtttcattgaggaagtagaacgcgccggggagcagagccgccacggtgccgctttcgcgcatcgccgccacgccctcttccgtcagatactcgatatggtcggcggaaagcccatgatagcggctcaccagttgtgcgccgcccagcgacgagagctgctcaacgtggccttttaccggaatgcccagcgcctgcgcggcctgaaatacgcgctcagtttgctgtggactaaagccgacgttttcacagaagacgtcaacgctttcaaacagcccctcttgccacagcgtcggcagtatgatctcgcagaccagcgagatatagccatcggcgtcgccatgatattccggcggcgtggcgtgggcggagagcagcgtcgccgacagttccacgccattgtcgtcagccagttgtcgggcgacccgcagcattttgcgttcgttttgcagatcgagaccgtagcctgatttaatctccagcgttgtcaccccttcacgcagaaggcgctccagacgcggctgcgccagcgccagtagttcagcttcgctgctttcgcgcgtggcacgcacggtggagttaatgccgccgccgttggcgctgatggtttgatacgacacgccgttcagccgctgctcccactcctgcgcccggctgccaccaaaaatcaggtgcgtgtggcagtcaatgagacccggcgtcagcagccggccttcgaggtcgatacgacgccccaccggggcgtcagcgtcgtcgacgatcgcctcgatacggccgttacgcaccagcagcgcatggcgctccagcaggccgtatggttgagaagaatcaggattcaaagtggcgagacgcacgtttcgccagataacgagttcagcggtggcttcagtcatagcattcaacttgttatgggttgtatagacatttattttcataacgccggtaatgtcaataaaagcgcgggtaaatgttatttttttgtgactaaagacgttccatcagcgcttcgcgttgcgtaaagaagtgaagtttttgaactggcatcttcccgtttcgttcaagttagtataaaacagcaggttttaaaggacttataccctgtcacgcacaaagggtatgtaactttgcatattatcgcccggagcaacatgaacacatattccgtttcccgtctggcgctggcgctggccttcggcgtgacgctgtccgcctgtagctcgacgcctgccgatcaaaagccctcaacgcagactgcaccgggcaataccgcacggccgattcttagcgccgatgaagcgaaaaacttcactcaagcggcctattttcagtcgctgacgccgaatgccgccgcgtggacgccatccgctatcagcctgccggcgcagcctgatttcatcgtcggcccggcgggtgcccagggcgtgacccacacgactattcaggccgcggtcgatgcggcgattgcccgtcactctgcccgtcgcctgttcatcgctgttatgccaggcgaatatgcgggtactgtctacgtgcctgccgcgccgggcgcgctgacgatttatggtaccggtgaaaaccctgccgacgtcaaaatcagcgaagcgattgattccgaaatggaccgcaatagctggcgtcatctggtcaatccgggcggcaaatacatgccaggcaagcccgcgtggtatatgttcgacagctgccagagcaaatccgccgccaccgtcggcgtgatgtgttccgcggtcttctggtcgcagaataatggcctgcagctgcagaacctgaccatcgccaacaatctcggcgacagcgtcgatgccggtacccatcaggcagtggccttgcgcagcgatggcgaccaggtgcagatcaacaaggtcaacattcttggccgccagaacaccttctttgtgaccaatagcggcgtgcagaaccgtctgcaggataaccgtcagacccgtacgctggtaactaatagctatattgaaggcgatgtggatatcgtttccggtcgcggcgcggtggtattcgataataccgatttccgcgtcgtgaactcgcgtacgcagaaagaagcctacgttttcgccccggcaacgctgaaaagcgtaacctacggcttcctggcgaccaatagccgcttcaccgcgtccggcgataacgtcgcgcagctgggccgcgcgctggacgtcgacggcaacagcaatggccaggtggtgattcgcgatagcgtcatcaatgaaggcttcaacattgctcaaccgtgggcggcggcggtcggttctaatcgcgccttcagcggtaatgttggcgcgcagtatgacaaaggcaacccgcagcgtaaccttaacgacaacggcttcaaccgcatgtgggaatataacaaccgcggcgtaggcagttttgtggttgccgctccgaaacagtaatattatcggcccgcgctctccccgagcgcgggcttttcttatccgcgtgtactcctgtcacaacgccaattaataattttcgccaacggcgaataaatcctcccgctcgcgcgtttactcttcagtaccggcaacgcgatgccttatcgcgtctctcactcacctggaggccaccatgaacgcacgaatttctcccatcaggcgcttagtcgttccggcgctgctatttttgttatataccccggcggcgttggccatgggcgataacagcccgagcaaacaaaccccggattgcccgagcggtcaggcctacgacagcgtgagccaaaaatgcgtcccacagaaaaccagtagccttagcgatgaggataaaaccaattatgcctggcatctggcgaaaaaaggcgaatatcaggccgcacttaacctgctggatacgctgcacaacgccaatacgcctgaggcgtggaactatcgcggctacgccacccgtaagctcggcagaaccgatgaaggaattggctattatcagcgggcgctggcgctgaaaccggactacgcgaaagcccgcgaataccttggcgaggcgtggatggtcaaaggacgccccgatttggccaaacagcagctggcggccatcgccggcatttgcggccaaagctgcgaagagtaccgcgatcttcagtcggcaataaacggacatccggaatcctgatagtcgtgattcgccagaatcaataaggataagaacatcgctaaccgtatcgttgatagccaacttgccgcccatctttctcgcctgtggcgctacggcctcgtactctcgcacaaccgcgacgtcgccgaggagctggtgcaggccacctgccttcgcgcgctcgaaaagagcgcgcagtttacccccggcacccgcatcgacaggtggctattcgccattttgcactcaatctggatttcagagctgcgcgcccgccaggttcgcctcggccaggggtttgtcgagtgtgaggagctggccgcccccgagcctggcgaacaggacgatacgcggtggcgctatcggcaacttatgctgcgggttaatcaactgcccgaggcgcagcgtaatgccgtctttttggtgtatgtcgaggggtttagttatcaggaagccgccgagacgctatcggtacctattggcaccattatgagtcggctggccgccgcgcgggaaacactggccaaaacgccggcgatttcgcccccggcgcaggagaaacgctcatgaaccctattcgcttttccccaccctggcaggacgaggccattgtcgcctggcttgatggcgaaatgtgcgcggaggacgcccgccgttttagcgaaacctttgcccgcgacccgcagctcgccagccgcaccgccaggttaatgaataatcatcagccttatcaacatcaacatgctttcgccgccctgattgatgaagcgcccgtggcgcggatgcaggcgaaactggcgccctacctcaccgggccgaaaagtaaagcgcaaaatcaggcgcgcttcagccgtcgcgcgctgattgccgcctcattgggcctgttggttatcggtagcgcagcaagttatttctggcggcctgagccgcaggaagacgatgacgagaatattcgccgtcttgaagcccagtacatgtcgctatatagcgcggaaaccgtggccgatgttgataattcacccgcgatgctcgaccgtggcctgcgtcgttcggcgcaggatacaggactgttgctagaacgacgccagctcgccttgcctgaggcggagctgaaaatggtccgtatgctgcgctacgaaagtacctcgatcacgcaaatcctctggctgcataccggttacggcccggtcgcgctttgtatttcacccgccgcccggcaatccgcctcaccgccgcaaaatgagcagcgtcagggcatgaacctgcgctggtggcgccacggcggctaccagtttgcgctgatcggccgtatgccggcgcccgtgctcaacgatgcggcgcacaccctgcggcaggcgatagtttaagccttcgcctgcggcacccacaccagtttgttaaccgcaaaaccgagctcagcggccagggcaaggtactgctgtcgaatgtgggacggaatatcaggggcgcgcgaaagcagccataaatagtcgcggtttggaccgcttaccagcgcgtactggtagtcctcgtcgagcgcgatcacgttatacccgccatagaaggggccgaagaaagagactttcagcgctgccgtggtggaagcgccggtaaaataggctttgccctcgctctcgcgccagcgtttgttgcgcgggtcaaatcctcgattgagtacgcgaatgccgccgtcgtcacgcatactgtaggttgccgtcacctgctccagacctcgttcaaaacggttttccagacgcgcgacttcataccagcgccccagataacggctggcgtcaaaatggtttatcggttttaccccttgaggtggcgttggggttttacaggcgaccaacgccagcgataccgcaaccccggtcagaattggccatagtttcatcgcatatcctcctttttctctttcctggcagacaagtataaccccgcgcagagagcattcgtcgtttttcagagagatttaccgccttgtctgtacaagaaacatgagaataaaaaacatatatatcaataacataattaaaaacacattcactaaccgctaatttgtacaaattattccatagaaatttgtacaactttcctctgagcgtctatagttgacgggtagctcgattttacgcgcgcgctcgggtcagcagtctgcgccaacgccgcggttattttgaggtggttcctgttttaccgttgcctgtccgcaatgttttggcgtaaacgatgtgcaaatcgtttacgccagcggcttttatttatcgcgtgggagattcaggcttatgcatatcaaaaatacgatccctgtgcagtttatagctaactgcgcattgctgaaaaacatagaaaatagcttattacaggaaaataaaaccgttgacgatcttcaattaattagtgagattaatcaacggttacaaatagaaagtaatgaaatacttgctgatatctatttacaggcgctggatattctgcgctgtggtattcgtcattaattcgtccatccgcttcgtggagaccaaaatgttcagtaaacacacgcacatttgttccgaacgctatgacctgtggattgacaaccactttctgatgagtggtatcagccttattctgcgcacgctgccagaaagttgctttcgcaaaaagcatgttttcttcaccagcgatagctatttctcggtgttgcaacacaaatataatcgtcgggaaacgatttttattttattaaccgaaggcaacgatcttaatttccttagcgaactgccaatgttacgcatccccgccagatcgacccctgctgaattaaaaacatttctcaatcaaccgacccgttattataaatcgcatacttctcctggcgaactgatacagtttaccgagcgagaaaagaaggtcattcagctcatcagtaatggcgaagccattgccagtattggtcgctcgctaaacttgcatattaagacaatttatcaaatccgtttgaatctgataaaaaaactgggctgcagcggcaggaccgatttctttaatatcagccgtagcgaaacatttaagtcctggagtcaaatccatctgtgagcacgcgcgacgtaagcaaacagcaacctgcctcacttgcaaggcaggtttttttattcgttaccgtggaagtgaatactaaagccctgttcctgccagtggcccagcagctccagttgcagcggcgaggcggggcgcccggtccagacgaaaatatgttgtccaggaaacagctccgggcggggagattctaacggttccgccagcacgttaacatgccaaccgcgttgcgaaagacgccaggcttccagccataggccggtgcggtcttcattcccccaccccaccagcagcgtctccttgccattttttttacgcgattccgctaaaaacagcgccacgcaatcaatcaatatgccatccaacatgctgctgatgaccatcgaggtgttttgatcgagttttagccgctggcgcaccggcgcgaacaggctatcaagcagggtgtcgacgggatgctgatgacttaatgcggtgattttggcgcggattttggccggctgcatatagcgcaggatactcatcatctcttcctgcaactgtgcggattcatcacgggcggcaggtagctggccttccagcagcgctttcaccttgcccactgaaacgccacgttctatccagcgcttaatttcttcgattcgctgaatatcttcttcatcaaactgacggtgcccgccttcgctacgctgcggtttcagcaaaccgtaacgccgctgccaggttcgaagggtgaccggattgattccgcaacgctcggctacttcaccgatactgtaaaaagccataagccgccttatctcaacctgatactttagcgcctaaactaacgaatttaggcatactgtacaactctcttttcttgtacagataaagatatcaggttgcagctcacagcgtgcgggaaaaaggatgaaagtatgtttacgctatcccaggagggatcatattttccccggccaggcgatagccggcagaccacccagtcgcgggctggcaaacagatttccctggaaatgagaaatacccgccgcctccagccacatccactcctccgcctgctcaacgccaaccaccgatacggcaatttccagcgagtggcagcatttaataatcgcctgcacgatagcctgacgcggcccatcacgatggatgttgcggatcagctgttggtcaattttaattcgatccggttgatattgcgccagcagcgatagcccggcaaaaccggcgccaaagtgatcgatagcgacgcgaattcccgcccccttcaatttgcgtacggcatcggtaaactcatccattcgcgaaatcacttcacgctcggtgaattcaacaataatttgttccggaatcaaatcgttgcgctgaatttccgttagcaggaatggcaccgcatccgccactttcaccagcgtcatcggcagtagattgatggtcagcgtacgttcacgcaggcctaacttaccggcaatggccagcgcaacccgtttactttgcagatccgcgacgtaaatctcatcgcctgacaaaccggcaaaataggctgcgggcggttctccgtcaacggtacgcagcagcgcttcccaggagattatttcgcaggcaaaggggtcaaccaccggctgaaaagcaaaacagcatgattcagcgccgtcgatacaaggtacggccggataaaacgtactctcatcagcagtaaaatcccagctatcagctgacggaatttcataataattctctttttccgtcgcttcgacaaaggtacggaaaaaatgcagcgcccggtcgtcgtaagtcagctgatattttgtcgtccccttatccagcacgttctgtagtaccgcgtcgcgatcgtgttcccttaaatcaaacagctccatgccgaccttaccaaagcggcgagccggcgcgtaatcgcacaaaagctccaccagattgtaatgacgcgggtcggcgcaaatatgtcgatagatttgctgtacgttttcttccggtccctcaatgagttggaaaaaatgcgtaccgttaaaaagtaaaataccggtgacatccgcctgaccatttctctcgttagccgcagcaaccatcgactcgagcgatttgaatgagacatcgtcgcagatatggctgcgataaatgatggtggtgagcatagcggttccagatgagaggtataagcattcacagtagcagttactgttcgatacgtcttgcgaaacaagtatttatattaacaaaaattgaacacacaacgccgccatgccgcataatcttgtacaatccgtcacgcttaaaaccctcattgcaattttacacaaaataaaaaaacaacaaatttatcaataattttcaatcaactatactctaggcacgatttattgcgcaatacactatgtacaagttacaaattattgtataagtttactcacagttaacagatgagtgaaattaaaggagcgcatatgcagcagaatggttacattccagatacagcgaacgcgatagcccagtatttcaacaaagcatcgttaccttctcagcaggagacgctgggcgaaatcgtgatggacattctcaccgaagggcggcatttaaaccgcaaagcgctttgcaccaagttactgagccgtcttgacgtcgcacgagccccggaagaagaaaatcattatcaaacgttgattggcctgctgtttgagcgtcaggagtaaacgctgactgtcggcctgcacctgacctggcctacaggaacaaccaggcatgcagagggacgatgatgaaaagcagtcaatcagatcgggttagcgatgagattattggcgaggcagttttatctcttcttaaaacaaaccggccaattaatattccgacgctgctagtcaaacttcggttaatgcaggcagcggaaacgaaccgccagcgaaggaatgcaattattgccgttatcgatgaaattagcgtcagactcacgacgcgcggtaatcacgcgccggtcattaaaaagattaacggccagtgggaaaacagagccgttgttgtggatagtaacgtcgaaccgacgggcaaaaaaatacactgatccccgaacaagtttaataaacaagtgagaatatgatgagacagactatgcatcagcaatcagatatttacgcaggactgcaggatacagcgctctcagaatatttccgcagcgccggagataaattagtcgatgaatctgcggtaatgtcgctggcaatcgacagtatcctcagctcagatgggcatctgagcaataaggcgcttattttatggttgatcaatgcgctggaaaccaccgataacgtggttaccgcggatgtgattcgcaagacgctggaaattgtcgtcggctatacgatggatgatatttaaagctgtcagtccgaataaaaaaacctcgccggcgcgaggtttttttctatcaatagcaaattaatgcgcgttaaccactacccacatagggccctgaccaacggcataacgccctttctcttttaacagcccctgctcgccggcaatttcataaaccgcgatatgatgcgatttctgcccggcagcaatcagatacttaccgctgtgatcgagattaaagccgcgcggctgcgcttcggtcggctggtagccttcaatagacagtacgctaccgtcttcagaaacgctaaagatggtgataatgctggcggtacgatcgcaggcataaagatgacggccatccggcgtaatatggatatccgcagcccaacgcacgccggtaaaatctggcggcatcatatccagcgtctgtacgcactcaattttcccgtgcggatctttaagctcccacacgtcaacggagctgttcagctcgttcacgcagtagccatactgctggttcggatggaacaccatatgccgcggaccggcgccttccacggtagtaacttccgccggctcctgcgcggccagatagccgtcatcgctcagattaaacaggcaaatacgatcctgcttcagcgccggtacccatagcgtgcggttgtccggtgaaatattggccgagtggcagccctccagtccctcgacgacggtgaccgtttcgcccggcaggccgtcaatcaatggcgtcacgctcacgcagccctgattgtaggatgcgctgaaaacaaaacggccctgatggtcggtggagatatgcgtcgggctccccggcagcgcggcttcgccggcgaaagtcagcgcgccattatctggcgcaatgcggtaagccaggacgcgaaactccggacgcacgccgacatagagatactctttgttcgggcttaccaccatcggctgcacctggcccggggcatcaacaacctgaaccaatgtcagatttccctcagcattgaggctccagacgtgaatctgatggctctccgggctggcggtatatacggtttgtttcatgactactcctttcctcactgctcgtgaaactgctcgtggacatcgttatacatttcatccggcgcgcggcgcaacgatgaatggtatagacgcttttaacggtagatgctgaaaaatttgcccctgagacgaagccgtgtaccatcatggcagactctttttcaccatttaccggaaccaactcatgacctcacgcgtgatcgccctcgatttagacggcaccctactgacctcgaaaaaaacgattcttccggcgtcgctcgatgcgctggctcgcgcccgggaggctggatatcaggtgatcgtcgtaaccggccgacatcacgtcgctatccatcctttttatcaggcactggctctcgatacacctgcaatttgttgtaatggtacctatttgtatgattatcatgcaaaaaaggttctcgaagccgatccgatgccggtggataaggccctcagcctcaccaacatgctcgccgaacacgatattcacggtctgatgtacgtcgatgacgccatgctttatgaacgtccgaccggccatgtgatccgcaccactaactgggcgcagtcgctgccggttgaacagcgcccggttttcacccaggtggattctctggcacaggcggcgcgtgaagtacaagcggtttggaaattcgcccttaccgacgaaaatatcccgaaactgcaggccttcgcgcagaccgtcggccagaagctgggcctggaatgtgaatggtcgtggcacgatcaggtggatattgcccgcgccggcaatagcaaaggcaagcgcctggcgcagtgggtcgccgcgcaaggattatccatgcaggacccggcaatagcaaaggcaagcgcctggcgcagtgggtcgccgcgcaaggattatccatgcaggacgttatcgcttttggcgataactacaacgacctcagcatgctggaagccgccgggaccggcgtggcgatgggtaacgcggttgaggaagtcaaagcacgggccaacgtggtgatcggcgaaaacgaaacaaccagcatcgccgactttatcaatcgtaacctgctgtaatcaggccgcgatcgatacgctcttaatttgcgcatacagccactgacctggggtgatgcccaggtcatcccgcgcccatgggctaattcgcgcccatagcgttttgccgctgaccgtaagctgtacctcaatctgaccgttggtttccacacagctaacgacctgcgcgcgcagaatattccggatactggtttgtcgcggatgctccagcaccagcgacacatccgacgcctgaatacgaatacgcgccgcttcgcccggctcccgcgccagctgattaacccatagttgctgatcgcccagcgccagcgcagtcattgcatattgcggatgctgcgcgatcaccgagacgttaagaatcgtgctctgctgctcctgcggcagccacggatgcatcacgctgctgctccacaccgtttcgagatcgccaaacgccttcacttttcccgcctccagcaccagcacgttatcggccaggtgctgaatttcatccagcgagtggctgacatatagcatcgggatgtggatctcgcgcgccagtctctgtaaataggggagtaattcgcgcttgcgcggaatatccagcgaggccagcggctcatccagcagcagcaattccggcgcggtcaacagggcgcggccaatcgccacccgctgtttttccccgccggacaaactaccgggcagtcgttcaagcaggtgctcaatgcccaacaacgccaccagcttatcaaattgcgcggccatgcttttggccatcccatatttcaggttgccgcgcactttatagtgcggaaacagccgcgcgtcctgaaacacgtagccgatgcgccgcttctccggcgccaggcagatacgctgtcgcgcgtcattgagtacccgaccattgagcacaatgcgcccctgctgcggctgcgtcagcccgctgatagcattaatcagcgaggtttttcccgcgcctgagacgccgaaaatagcggtaatgccgctggcgggaagggtttcatgcacttcgaggcagtggttgcccaacgtctggctaaaatcgagctccagcatagttattttcccatccgcttacggctaaggcgcgccagccattcggagaccagcagtgataccagcgccagaacaatagagatgatgcataaccgcgcggcggcgccttcgctgcctggcgtttgaatcagggtatacatcgcggaaggaatggtgcgcgtttcgccaggaatgtttgagacaaaggtgatcgtcgcgccaaactcccccagcgaacgggcgaaggccagcaccgtaccgacaataatgcccggcagagtcaacggcagcgtgatggtgaaaaatacccgccagcgattagccccgagggtgcgcgccgcctgttcaagctttacgtccaccccttcaagggcgaggcgaatcgcccgcaccatcagcgggaatgacatcaccgccgccgccagtaccgccccccgccagctgaaggcgaaagtcagaccaaaccagtcgtataaccaactgccaataaagccgcgccgccccatggaaatcagcagcagatagccgactaccaccggcggcagcaccagcggtagatgtataatactatcgagtaacgctttgccgggaaaatggcggcgcaccagcagccaggcaaaaaagatcccaaaaggtaagctgcaaaccaccgccagggatgaaactttcaggctcagcagtaccgcctgccattcgggatcgcttaaaatcattgctgtgtggtgaatccgtaacgtttaaagatagccgaggcttccgggcctttgaggtagtcgtaaaacgcggttacggtagcatttttatgcccatcaacgatagccagcggatactcgacttttttgtgcgaatcctccgggaaggtgcccaccactttaacccccttgctggcgacggcatcagagccgtagacgatgcccagcgacgcttcgttgcgctccaccagcgccagcgcgccgcgcacgtcttctgccggcgcgagcttcggcgacaacgtctcccaggcccccagtttctgcagcgcttctttggcgtagatccccgccggcacgtgatccggatcgccgaccgccagacgcccgccttgcagcaggctgacccagtcggttttatcattaatggcgatatcgccgcgatcgctggctttcggcgccaccaccaccaggctattgcccagcagcgtggtgcgggaagccgtatcgattgattttttgtctacggcatagtccatccatttctgatccgcagaaataaatagatcggcaggcgcgccggcttcaatctggcgcgccagcgtggaggaagaggcaaaggaagaaaccacctcgacatgacgctcttttttatacgcctgggcgatatcctgcatagcgttggttaacgacgccgcggcaaaaacggtaattttgccgtcctgcgccagcgcatgaccagaaacgcagagcgttaaagccgctccggtcagaaaacgcgaccattgacctgccattggaaactcctgtgtgttcgttatgtagcgaataatataacgactatactcaggatttcccagcgcgatttaggggtaatcaggataggtacaaaagaaaacgcccggcgagccgggcgttggggaatcagtgattttgctggctgctgtctttatgaccgacgccggagaaaatgttgaacacttcgccgagaccgtaaatcagaccgaggatgaccgccatcaccacaggtaccatgacgacagcaaataccagacttttcaacagctctaacatggttggctccagatagtacgaatacttcattgtaaccatttcagccggaaaaacacgccccatttgtgcggtgcctcaccgccgctgcggcagatggctgttgcaagatggacgctatcgttcacaatacgctttttacgtcaggaattgattatgcaggccgaaatccttcttacgcttaagcttcaacagcgcctgttcgccgatccccgccggatagccttactcaagcagattgatcggactggctcaattagccagggggcgaagaacgccggtatcagctataaaagcgcatgggatgcgatcaacgaaatgaaccagcttagcgaacaatcgctggtcgaccgcgccaccggcggcaaaggcggcggcggcgcggtgctgacccgctatggacagcggttgattcagttatacgatctgttggcgcagattcaacaaaaagccttcgacgtactaagcgacgatgacgccctacccctcgacagcttgctggcggcgatttcccgcttctcgttacaaaccagcgcccgcaaccagtggttcggcaccatcaccggtcgtgaccaccagcaggtacagcaacatgtcgacgtgctgctggcggacggccagacccgttttaaagtcgccattaccgctcaaagcgccgaccgcctcgggctcactgaaggccaggaagtactggtgttgctgaaagcgccgtgggtcggcatcacgcttgaccacgccgtggcgcagcaggcagacaaccagcttaccgggcacatcagccacattgaacgcgggccggagcggtgcgaagtcatcatggcgttgccggatgggcaaaacctgtgcgccacgctgtcaacggcgcaaaccgacggtttgcaggaaggcgcgcaggcgatcgcctacttcaatgccgatcgcatcattctggcaaccttatgctaatggcattgactttattgccgtgaagacgtatccctgaagcacaacactgcaaaaagtgggatacacaatgtcatcattgcaaatttcgcaaggcacgtttcgccttagcgatataaaaaccttacatatcgatcgcctcacgctgcgcgctggcgaaagctgggctttcgtcggcagtaacggtagcggtaaatcggcgctggccagagcgctggctggtgaactgactctgttaaacgggcagcgcgaaagcgcatttcagcgtactactcgcctctccttcgaacagctgcagaaactggtcagcgacgagtggcaacgtaacaacaccgatatgctcagtcccggcgaagaagataccggtcgcaccaccgcagaaatcatcgaagatgaaagacacgacccggaacgctgtgcccggctggcggagcagtttggtattagccacctgctgacgcggcgctttaaatatctatcgacgggcgaaacccgcaaaacgctcctctgccaggcgctgatgagcgaccccgacctgctgattctcgacgagccgtttgatggcctggatgtcgcttcgcgccaacagttggccgacctgctggccagcctgcatcaggcaggcatcaccctggtactggtactcaaccgcttcgatgagattccagaattcattgaatatgccggcgtgctggcggattgcacgctgagcgaaaccggcgagaaacaggcattattacaacaggcgctggttgcccaactggcgcatagcgaaaaacttaccggtatgacgctaccagaaccggatgcccccgccgcccggcgcgacttagcggcgaacgctccgcttatcgtccttaacgacggcacggtgtcgtataacgataaagcgatcattaaccagctaagctggacggtgaaccccggcgaacactggcagattgtcggccccaacggcgcgggcaaatccacattgctgagcctgatcaccggcgaccatccacagggttacagcaacgacctgacgttgtttggccgccgtcgcggcagcggcgagaccatctgggatatcaaaaaacatattggctatgtcagcagcagcctgcatctggaataccgtgtcagcactaacgtgcgtaacgtgatcctttccggctactttgattcgataggcatttatcaggcggtctctgataagcagcacaagctggtccagcgctggctggatattctcggcattgataaacgcaccgccgacgcgccgttccatagtctgtcgtgggggcagcagcggttggcgctgatcgttcgcgcgctggtcaaacacccgaccctgctgatactcgatgaaccgttacagggactggatccgctgaaccgtcaactggtacgtcgtttcgtcgatgttttaattggcgaaggggccacgcagctgctgtttgtatcgcatcatgccgaagatgcccctgactgcattacccaccgtctggagttcattcgcagtggagacggttacacttaccgcctcggtccgctggcagaatagcgctatacaggggtctgcggatccctgtattttttcagagaaataaccaaaaatcacaacaaataactgttttataaagaattaactaaaatcagccttaatatcaaaccaagtgtaaacgattccaccattttggcctgtgtcacacttttcccttctttggtatgctatcttcttctcacacgataagcctattggagcgaatcatgaaagtactggtcacaggtggtagcggttacattggaagtcatacttgcgtacagctgctgctgcagggacatgatgtgattattctcgacaatctctgcaacagtaaacgcagcgtattgccggtcattgaacgtctcggcggcaagaaagccacctttgtcgaaggcgatattcgtaatgaagcgctgatgacggaaattctgcacgatcacgctatcgaagccgtgatccattttgccggcctgaaagccgtcggcgagtccgtcgccaagccgctggaatattacgacaataacgtcaccggtacacttaaattggtttccgctatgcgcgcagccggcgttaaaaactttattttcagctcctccgcgaccgtctacggcgaccagccgaagatcccttatgttgaaagcttcccgaccggtaccccgcaaagcccctacggtaaaagcaaactgatggttgagcagatcctcgccgacctgcagaaagcccagccggactggagcatcgcgctgctgcgctacttcaacccggtcggcgcgcatccatcaggcgatatgggcgaagatccgcagggcattccaaacaacctgatgccgtatatcgcgcaggttgccgttggccgtcgcgaatcactggcggtattcggtaacgactatccgaccgaagatggcaccggcgtgcgcgactacatccacgtgatggacctcgccgacggtcacgtcgccgccatggaaaaactggcgaacaaagctggcgtacatatctacaacctcggcgcaggcgtcggcagcagcgtgctggacgtggtcaacgccttcagcaaagcctgcggtaaaccgattaattatcacttcgcgccgcgccgcgatggcgatctcccggcctactgggctgatgccgccaaagccgaccgcgagctgaactggcgcgtgacgcgcaaccttgacgaaatggcgcaggacacctggcactggcagtcccgtcatccgcagggttatccggactaatagcctaaaggtaaggctctaaggaaataccatgacgcaatttaaccccgtcgaccatccgcaccgtcgttataacccgttaaccgggcagtggattttggtttcaccgcatcgcgccaagcgcccctggcaaggggcgcaggagacgccggcaaaacaaaccttgcccgcgcacgatgcggattgtttcttgtgtccgggcaatacccgcgtcaccggcgacactaacccgaattacaccggcacctacgtgtttaccaacgactttgcggcattgatgaccgatacgccggatgctccggagagcgacgatccgctgatgcgctgccaaagcgctcgcggcaccagtcgggttatctgcttctcgccagaccacagcaaaacgctgccggaactgagcattgaagcactggaaggcgtggttaaaacgtggcaagagcagaccgcggaccttgggaaaagttatccctgggtccaggtcttcgaaaataaaggcgcggcgatgggctgctccaacccgcatcctcacggccaggtatgggccaacagtttcctgcccaatgaggcggaacgtgaagaccgtctgcaaaagaaatatttcgctgagcagggttcaccgatgctggtggattatgtgcaacgcgaactggccgacggcagccgtaccgttgtagaaaccgaacactggctggccgtggtcccgtattgggcggcctggccatttgagacgctgctgctgccaaaaacgcacatccagcgtctgaccgatttaaccgcagcccagcgccacgacctggcgctggcgctgaaaaagctgaccagccgttacgacaacctgttccagacctccttcccctactccatgggctggcacggcgcgccgtttaataatgaagataatcaacactggcagctgcacgctcacttttacccgccgctgttgcgctccgccacggtgcgcaaatttatggtcggctacgaaatgctagccgaaacccagcgcgatctcacggcggagcaagccgccgaaaagttacgtgccgttagcgatatccattttcgtgaatcaggagttgaataatgagtctgaaagagaacacccaggcgctgtttgctgaacagtttggctaccctgccagtcacgtcattcaggcgccgggccgcgtcaacctgattggcgaacataccgattacaacgatggtttcgtgctgccgtgcgccattgactatcaaaccgttgtcagctgcgcgccgcgttccgaccgtatcgtgcgggtcattgccgccgattacgataatcagcgcgacgagttttccctcgatgcgcctatcgttagccacgatacccaacagtggtcaaactacgtacgcggcgtggtcaaacacctgcagaagcgcaataaccacttcggcggcgccgatctggtcatcagcggcaacgtaccgcagggcgcgggtttaagctcctcggcttcgctggaagtcgccgtcggcaccgtgttccagcagctatatcatctgccgctcgacggcgcgcaaatcgcccttaacggccaggaagcggaaaaccagttcgtcggctgtaattgcggcattatggaccagcttatttcggcgctgggtaaaaaagatcatgcgctgctgattgactgccgcacccttggcaccaaagcggtgtcgatgccgaaaggcgtcgcggtggtgattatcaacagcaactttaaacgcacgctggtcggcagcgaatacaacacccgccgcgaacagtgtgaaaccggcgcgcgtttcttccagcagcccgctctgcgtgacgttgagcttgcacagtttaatgccgtggcccacgagctggacccgattgtggcaaaacgcgtgcgccatgtgttaaccgaaaacgcccgtaccgtcgaagcggcgagcgcgctggcaaacggcgacctgcagcgcatgggccaactgatggcagagtctcacgcctccatgcgcgatgattttgaaatcaccgtaccgcaaattgatacgctggttgagattgtcaaagcggttatcggcgaccagggcggcgtgcgtatgaccggcggcggctttggcggctgcatcgttgccctgataccggaagcactggttgaaaaagtacagcaggcggtagccgctcagtatgaagcgaaaaccggcattaaagagactttttacgtctgcaaaccatcccagggagccggccaatgctaacgccaactcgcgaactcgcgcccgacggacagccgtggaacgtgataacgctacgtaataacgccgggatgaccgtaacggtgatggattggggcgcgacgctactctccgcgcaagtgcctcttgccgatggcagcctgcgcgaagcgttgcttggctgcgccacgccgcagcaatatcgccagcaggcggcatttctgggtgcgtccgtcggccgctacgctaaccgtatcgccaacagccgcttcacgctcgatggcgaaatcgtgaacttaaccccgtcgaacgaggccggccaccagctccatggcgggccggacggcttcgacaagcgtcgctggcaaattgtcagccacgacgacagccaggtgctgtttgcgctcgactccgtcgatggcgatcagggcttccccggccatctgcaggcaaccgcgcgctatcgcctgactgacgataatcgtatcgccattgagtaccgcgccaccgttgataagccctgcccggtcaatatgactaaccatgtctattttaacctcgacggcgcgcagggcgacgtgcgccaccaccgcctgcagatcctggccgaccagtatctgccggtggagagcgacggtattccgtatggcgatttgcgcgacgtggagtacaccagctttgatttccgcgcgccgaaggtgcttgctggagagtttcttgccgatgctgaccagcaaaaagtgaaaggttacgatcacgcctttctgctgcaggccaaaggcgacgcccgccagccggcggcgcatgtctggtcgcaggatgaaaagctacagctgacggtgtatacctcggccccggcgctgcagttttattccggtaactatctcggcggcacgccatcgcgcggcagtcaaccttacggcgactggcaagggctggcgctggagagcgagttcctgccggactcccccaatcatccgcactggccgcagccagattgcgtattacggcccggcgccgagtacgttagcctgacggaatatcaatttatcgccagataacgccataaccctccctgcggagggttttttttcgcctttttgctgtaatttgcaccgctaaaagacaaaaagctaacctgtgttttacaagcatcttacactgcgtcactattttcgctatggttagggataagcattgccatgaggcaaatcacggcaatataatgagaatagttatcaatcaataaacacatacaccacagtagtcgggttgcgtgtaggaggagtaagagaatggctgtaactaagctggtactagttcgtcacggcgagagccaatggaacaacgaaaaccgtttcaccggttggtacgacgttgacctgtctgaaaaaggcgttagcgaagcgaaagcggcgggtaaactgctgaaggaagaaggcttcagctttgattttgcttatacctccgtgctgaaacgtgccatccacaccctgtggaacgtgctggacgaactggatcaggcctggctgccggttgagaaatcctggaaactgaacgaacgtcactacggcgcgctgcagggcctgaacaaagccgaaaccgctgagaagtatggcgacgagcaggttaaacagtggcgtcgcggctttgccgtcaccccgccggaactgaccaaagatgacgaacgttatccgggccacgatccgcgttacgcgaagctgaccgatgcggaactgccgaccaccgagagcctggcgctgaccattgaccgtgtcgtaccttactggaacgaaaccattctgccgcgcctgaaaagcggcgagcgcgtcattatcgccgctcacggtaactccctgcgtgcgctggtgaaatacctcgacaacatgggcgaagacgagatcctcgaactgaacatcccgaccggcgtaccgctggtgtatgagttcgatgaaaacttcaagcctatcaaacactactacctgggcaatgctgacgaaatcgctgcgaaggccgcggctgtcgctaaccagggtaaagcgaagtaataagcgactgaataatttcagccataaaaaaagcgtgggatttcccacgcttttttatttttagccattgcaggcctaacgcgaacgcagccaacaatggcaaagtacaggctagccgcggcgcgctttaaccgcatccgccagctggcgcaggatggtctcagtatcttcccagccgatgcaggcgtcggtcacgctcttgccgtaggtcagcggttcgccgctttccaggctctgattgccttccacaaggtggctttcaatcatcacgcccataatcgcgttttcaccgccggcaatctgctggcacacgtcggcgccgacttccatctgctttttaaactgcttgctggagttagcatggctgaagtcgatcatgatttgcgccggcagaccggcttttgccagacccactttcacttcggcaacgtgctgagcgctgtagttcggctctttgccgccgcgcagaatgatatggcaatcgctgttgccgctggtgttcacaatagcggaatggccccacttcgttaccgataagaaacagtgcggcgcgccagcagcgttgatcgcatcgatagcgaccttgatggtgccatcggtgccatttttgaagccaaccgggcatgagaggccggaagagagttcacgatgcacctgggattcagtggtacgcgcgccgattgccccccagctcatcaggtccgccacatattgcggggtgatcatgtcaaggaactcgccagccgctggcaaaccgctgtcgttgatttccagcagcagcttacgcgcgatacgcagcccgtcgttaatgcggaagctgttatccatgtgcggatcgttaattagccccttccaaccgacggtggtgcgcggtttttcaaaatagacgcgcataacgatttccagctcgcctttaagcgcttcacgcagtgtcagcagacggctggcatactctttcgccgcggcagggtcgtgaatagagcacggaccaattaccaccagcagacgatcgtcgttgcctttgaggatgttgtgaatcgctttgcgagcatgtgcaacggtattagcagcattttcggtagcggggaatttttccaggagcgcaacgggaggtaataattcgttgatctctttaatgcgtaaatcgtcgttctgataattcatcttctttccaggcgttgccatacttatacaatgaaatgcaatccttccaatctatctcttcggtcaaaaagtgtaaacgtgattttacactgacgatggaataatcctggaattagggaaaaatacgccataaagtagcgaaaccctgccagccaactacaatttttaactgcaacatccaattaaatgtttattttcagtattatattttaaatcctcacgctaaggcggagtgttaaaccatagcaccgcagatccctggcacatctatgttggcgcgtttagctaacaaatcgactaagcaggagtatccgatgaatatgaataaactcacagccctacttctcaccgccaccttaagcttagccagcggcgccgcgctggccgccgatagcggcgcgcaatcgaacaacggtcaggccaattccgccgctgatgccggacaggttgcgcccgatgcccgtgaaaacgtggcgccaaataatgtcgataacgacaaaattaactccggcggcaccatgcttcatcctgatggttcgacgatgaatcatgacgggatgtcgagcgacgaggtccataaaaacagcatgtgcaaagatggacgctgtccggatacggataaaaaaatggaaagcggcaatggcatgaacaacgatgccagcaaaacggatggcacctcgcagtaattgaaacgggtgagataagggatcgaggtggcagtgctcaccttgatccctttgttcgctgaatttcggtaagatgtcatagtgtaataatgataactattaagggatgacatcatggcgcatgcacattcaccgacccctgctggcgaaaacagtaacgccaaccggctgctttgggcttttatcgtaaccgccggttttatgattattgaggccatcggcggcgtcatttccggttccctggccctgctcgccgatgccggacatatgctcaccgactccgccgccctcctgttcgctctgctggcggtgcgcttcgccagccggccgccaaatagccgccacacttttggttggctgcgtttaactactctcgccgccttcgtcaacgccatcgccctggtggtcattaccattttcatcttctgggaagcggtacagcgttttaaccatccgcagccggtggcgggaaaaaccatgatggttatcgccgtcgccggactgctggccaatatcctcgccttctggatcctgcaccgcggcagcgccgaaagtaatcttaacgtccgcgcggcggcactgcatgtgctgggagatctattgggttccgtcggcgccatcgtggccgctatcgtcattctgatgaccggctggacgccgattgacccgatcctctcggtgctggtgtcgtgtttagtactgcgcagcgcctggcgactgctgcaggagagtatgaatgagttgttggagggcgcgccgcgctcgctggatgtcgaagcattaggccgcgatctacgccgctcgatacctgaagtccgcgacgttcaccacgttcacgtctggctggtgggggaaaaaccggtgatgacgctgcacgtacaggtcgtgccgccgcacgatcacgatgcgctacttgatagcatccagcattttattgagcataaatatgaaattgagcatgtgacggtacagatggagtaccgtccctgcagcggcccggaatgccacctgaatctggcgcattccggacatgagcatcatcatcaccattaacgtgaaagcgcgtgagaaccccgctcacgcgcgctgttaatccacatccggctgccattcagggcaatgaacgtcagcagcaaatattccagcgacatcgcatacacgccctgaagagcgaatatcaccacgctaatgacgttgatgatcacccacagcagccagttctccacgtatttacgcgtcatcaacaccatcgcggcaatcgacagcaccatcatgcaggaatcccagaatgggaaagcatccggttccagcgtcggcatcgccacctgcagcccgagcatttgcatcaggttgacggcgatacgggtcaggaaggcaaacaccgggttaataaacaccgtcatcagaccgatagccactacgcagcccgccagccaggccagcgcttttggcaacggcagccagcgaattttcagttccgcttcgttatcgctggtctgccttgaccacgcgtaccaaccgtaaacgttcgccgcgaagaaaaacagctgtagcagcaggctggcgtacagctggatctggaagaagatgatcgcaaaaagcgtcacgttcaccaggccgaaggcatagttgctaatcttttccaggctcgccagccagatgcacaacaggccggcgatggtccccaccgcctcaatccacgacagatcgtagccgccggcgccgatcggtatatgcactaaaatattctgcgtactgaaaaaatccattttatcccctaagcgtaacacgacgcggtaatgagttatccccgtagtgtagccgcaaattccagcatacggttaagcggaattaatgccccggcacgcagtttggcgtcaacgtgaatttcgtgttcaatgccgccctgctctaacccttgcgctatcgctttcaggccgttcatcgccatccacggacaatgggcgcagctacgacaggttgcgccctcacctgccgtaggcgcttccagcagctctttttccggtaccgcctgctgcattttatagaagatcccgcgatcggtggccacgataagctggcgctgcggcaggcttttcgccgcggcaattaattggctggttgatcctaccgcatccgccatgtcgacaatcgcctgcggtgattccggatgcaccaggatcgccgcgtcggggtagagccccttcatgcgcgccagcgcctgggttttaaattcatcatggacgatgcaggcgccctgccagcacagcacgtcggccccggtctggcgctgtacatagcggccaagatggcggtccggcgcccaaagtatcttttgtccgaggctatcgagatgttcaatcaattccacggcgatgctggaagtcactacccagtcggcacgcgcttttaccgccgctgacgtattggcatagaccaccacggtgcgatccgggtgagcatcgcaaaacgcgttaaagtcatcaatgggacagccgagatccagagaacactccgcattcagcgtcggcatcaggatggtcttttccggactaaggattttggccgtttcgcccataaaacgcactccggcaaccagcagcgtggaggccgggtgacgcgcgccaaaacgcgccatttccagcgagtcggcaatacagccgccggtctcttcggccagttgctgaatttcaggatcggtgtagtaatgcgccaccatcacggcgtcgcgttcacgcagcaggcgtttaattttctcgcggtaaaacactttttcgtcacggttcaacggttgtggttttggcgggaaaggataaatcgccgtttcaggatcaaacattacgctcatcatgcaatctcgttttactggcttaactttgaaaccgtaaatatcgctttgtatcgccttaatacggtcactatgttttatatgctaaacaagatagccgatcgcaagcgaaatgtcgtgatgaattttgtattccccggggacgatgctcgcatcttcccgggctaccggttcgtgcgctatggagtcacggtaagcgtagtgcgaacatggagatgattgtggagaatgacgcatagcaaaaaggcgcctttagggcgcctttttacattggtgggtcgtgcaggatgactcagcttcgcctcgccctactggccgttgctgacgcaacgttatccttcacgttcaacatcaaagttcaatgttgaatggtgggtcgtgcaggattcgaacctgcgaccaattgattaaaagtcaactgctctaccaactgagctaacgaccccttgcgggattttactgctgtaatcattcaggatggtgggtcgtgcaggatgactcggctttgcctcgccctacgggccgttgctatcgcaacgttatccttcacgttctaccagaaaccaccgttaaagattggtgggtcgtgcaggattcgaacctgcgaccaattgattaaaagtcaactgctctaccaactgagctaacgaccctaagggtgttacctgaaagattttgtactcggcaccatcattttagatggtgggtcgtgcaggattcgaacctgcgaccaattgattaaaagtcaactgctctaccaactgagctaacgacccgagtggtgggtgatgacgggatcgaaccgccgaccccctccttgtaagggaggtgctctcccagctgagctaatcacccgaaactgcgctggatactaccgatactgcttccaccgaccccatcattaagatgttgggtcgtgcaggatgactcgcttcgctcgccctacgggccgttgctgaagcaacgttatccttcacatttaacatcgaagttcgatgctaaaaatggtgggtcgtgcaggattcgaacctgcgaccaattgattaaaagtcaactgctctaccaactgagctaacgacccggtggtgggtgatgacgggatcgaaccgccgaccccctccttgtaagggaggtgctctcccagctgagctaatcacccgatactgcgctggatactaccgatactacttcaaccagaacgattggtgggtcgtgcaggattcgaacctgcgaccaattgattaaaagtcaactgctctaccaactgagctaacgacccactctggcgtcgctttgggcttgttcgatatcccttggcaacggcggcatatattactgatttcagatttcagcgcaactaaaatttcgataaagatcacttaactgcttgggtttcgtgcgacaagaccagaaataacgcgatttctggtcatgccataatcaacccagggcgttaagacgtttttgcgcttgtttcgcaccatcggtgccagggaatttgctgactacctgctggtaaacggctttcgctttcgcggtgtcgcctttgtcctgcatgataacgccgactttaaacatcgcatccggcgctttcggggatttcggatagtttttcaccactgaggcaaaataatatgccgcatcgtcttttttccccttattgtagttcaactgtccgagccagtagttggcgttcggctgataagttgaatccgggtacttcttgacgaagttctgaaacgccaccattgcgtcatcctggcgggacgaatctttaaccagcgcaatagccgcgttgtaatcggtgttggcatccccggtcatcgcaggcgccccggaagacgccgctggcgccgtactggcggcagccgaactttgatcgccggaagacgacggagcctgcgcctgcgcgcctgccgctgctgctccgccaccgctcgtcagcccgtcgatctgttgcagaatctgcttctggcgttcgacaatctgattgagctgatactgattttcctgaatctgaccgcgcaggggaatcaatatcgctttgggttatcggagagttgttgctggagttggggttaaaagctggcctgtgagcattggaaatacgctccagttgagtgacgcggtcttcgaccgagcctgagccgacactactgattggcgcctgagcaaaagcggcccagggggccgctatgccaaccagtaacgacagactcaataaatgatgtctgaagttactgctcatgcaattctcttagtaaaccagtacggcgcgacggtttttggcatatgccgcttcgtcatgacccagtactgcaggtttttctttaccgtaagaaacgatggaaatctggtcagcagaaacacctttgccctgcagatacatcttaacggcgttagcacgacgctcacccagagcgatgttgtattccggagtaccgcgctcatccgcgtgaccttctacggtcactttgtaggacgggttgctacgcaggaagttagcgtgcgcatccagcattgcagcgaagtcagaacggatatcgtacttgtccagatcgaagtaaacgatgttgttctgctgcagttgctgcatctgcagacgagcttgctcttcggaagacatgttgccgccgttagcgttagcgtccataccagtgccggcacccagcatgccttcaccgctctggtcgttgctggcgttcttgttggaagaacacgccgcgattgccataaccggcagagcgatcatcagccctttcagcactttgttcagttgcatttctttgattcctttaataatcaattatttattatcacagatacggcgaccaggcagggaattttacctgtccatcagttgccggaagacgcgctttgaaacgcccatctgtagaaaccagattcagcacggatcccatcccctgagaagagctgtagattaccatagtgccgttaggtgccagacttggcgtttcatctaaaaacgttgatgacagaacctgtacaccacccgcttccagatcttgcttagcaatgtgctgctgaccgttggccgagcttaccattaccataattttaccatcagcgctgacgtcagcatcctggttctgcgaaccttcccaggtaatacgctgcggcgtaccgccgttgatgttgactttatacacctgaggacggccagcctggtcggaagtaaacgccaggttctggctatccgggaaccagctcggttcggtgttattgctgcgaccgttagtcacctgacgaatctggccggagccaaggtccatcacgtacagattcaggctaccggttttcgacagtgcgaatgccagtttgctgccatccggcgagaaggccggcgcgccgttgtgctgcgggaaggaggcaatctgacggactgcgccattcgccaacgtctgaactaccagcgcggagcggccgctttcgaaggtcacataggccagtttagaaccgtccggagaccatgccggcgacatcagcggctgtgatgaacggtgaaccaggaactgattgtagccgtcgtagtcagagacgcgcagctcatacgggaactgaccgccgttggtgcgaaccacgtaagcgatacgggtacggaaagcgcctttaattccggtcagcttttcgaataccgcgtcactggcagtatgtccggcataacgcaggtactgcttggtcactttgaaagagccttgcgacaggatggtacccggcgcaccgccggtatcaaccaactgataggcaacctggtaagaaccgtcagggtttggcgtcacctggcctacgaccacggcgtcaacgcccagcgcggaccacgccgcaggttgcacttcctgagcgctacccggctgctgaggcaggcgcgagcgatccagcgggttaaacttgccgctgttacgcaggtcagccgctaccacgccgccaatatcttcaggcgcagcgcctgggccagcccactggaatggcaccacaccgatggggcgcgccgagtccaccccctgggtgatctcgatgcgtacttctgcgtgcagcaccgccgcccacagcatcaaaaaaccaaatgctactcgtaatgcctgcttcatcatatctcccttatccgggcggaaagcccacgataatttagcagaatgttaacaaacccaaatacacaaaactaccaaaaccctgtgactaccatagattgtttttccccgcttgcacggggaaaaacgattacagtttaaagtctagtgtcgcattttttattttctcataaacagcctgacttggcggtttaggaatactcgcagtacgtgctgccgttaatgccgcctgacacagcgcagggtcgcctccttcagaggtgatatcctttaatgtgccgtcaggcccaaggttgatatgcaacacgcaacgcttgccttgatagaggctggcatcatacaggcggctttgaatagccatctgtatttgctttgcgtatgcgctgatatcagctcccgttgccccgccgttggcgcctgaggcaccgctatctttcgatggctggccgttgcctttagcgccaccgccggttttcggcgcattcttacctgagctcaggtcaccaagcagatcgtcaacaccgcttgcttctttagctgcagcggctttcttggccgcggcggccttcgcggcggcggctttggccgctttatcagccgccgctttttctgctgcggcagctttggcggcagcggctttttcggctgctgcggctttttcagcagcggctttttccgcggcagctttctgggcagcggctttctcagcggcggccttttctgccgcagcctgtttcgccgcttcctgctgagctttcttctcggcctgctgctgcgctttcttctctgcatcctgctgagcttttttcgcagcttccgcttcggctttcttctgcgcatccgcggcggctttcgccgcttcggcttccgcctgtttcttcgcgtcagcggctgctttggctgccgccttagcggcagccgcttccgcgactttcgcctgggcatcggccttagctttggcatcagcagcggctttagcggcagcttcctgcgcttctttcgcctgggcatctgctttcgcttttgccgcggccgccgccttggctgccgcttcttcagcctgtttttgctgctctttcgcttctttagccgcttcctgcgcctgcagacgttcttgttccatttgcttcaggcgttcctgctcggcagcctgtttttcccgcagttcctcggcctgctgctgagcctgcttttcacgctgctcggccgcgcgacgcgcgctggactgctgttgctgctggcggttgtagttgttgactaccgcgccaggatcgaccatcaccgcatcgatggacgaacctccgccgccgccggaagtatccagatgctcgtcgaacgaactccagatcagtagcgcaatcagaatgatgtgcagcaccactgaaactatgatcgctcgtttaagcttatcgttttgttcggttgcctttgacactatcggttcccaaaaactgttcgcctgttgccgcttaaaagcaacggcggaatgctatcgatatccaccgccgctcgctccgcgggccgattaaataggcttggtcattaagccaaccgatttaacccctgcgctatgcaacaggttaagcgctttaatgatttcatcgtaaggcacatctttcgcgccaccgataaggaacaccgtcttctcgttcgcttcgagtcggcgcttcgcttcagcaatgacctgctccggcggcagttgggacaacgtttcctgaccgactttcacgctgtactgccctactccggagacttcaacgataaccggtggttcatcgttgcttttcaccgcttgcgactccgtggcgtccggcagatcgacttccacgctctgcgtaatgatcggcgctgtcgccatgaagatcagcaacagcaccaacaggacatccagcagcggaacgatgttaatctcggacttcagttcgcgacgtccgcgtccacgtgctctggccatggcttaccccttattgctttcgctgctggtaaacgcctgacggtgcagaatggcggtgaactcttccataaagttgtcgtagttcagttcaagtttgttcacgcgctggttcagacggttgtaggccataaccgccgggatggcagcaaacagaccgattgccgtggcgatcagcgcttccgcgatccccggcgcaaccatctgcagcgtcgcctgcttcaccgcgccgagggcgataaaggcgtgcatgatcccccagacggtaccgaacaggccgatatacgggctgatggaacccacggtgccaaggaacggaatatgcgtttccagcgtttccagttcgcggttcatcgagatacgcatcgcgcgcgacgccccttcgacaatcgcttccggcgcatggctgttggcacgatgcagacgcgcgaactctttaaagccgctgtaaaaaatctgctcggaaccggcgaggctatcgcgacggccctggctctcctggtacaggcgagacagttcaatgccggaccagaacttatcttcaaacgcttcggcttcgcggctggcggaattgaggatacgcgttctctgaataataatagcccaggaagcgatagaaaaaccaatcaaaatcaacatgataagtttaaccagaaggctcgccttcaggaacaaatcaaggatattcatgtcagtcactgcttaaactccgcgacaatagacttgggaagcgcacgaggcttcattaagagtggatcaacgcacacaatgagaacttcagcttcgttcaaaactgtattctcggcgttgacgattcgctgcgtgaaaaccaaagaggtgcctcgcatcgaggtaatttccgtctggatttcgagcatgtcgtcgagtctggcgggcgcaaaatactccagcgtcattttgcgaacgacaaaggcaactcgttcagccaacagaacctgctgactgaagtgatggtggcgcagcatctctgtgcgtgctctttcataaaaagcgacgtaactggcgtggtaaaccacaccaccggcatcggtatcttcgtagtagacccggaccggccatcgaaacagcgttgtattcactttacatcccggtaatgcaaaaaaagagtagtgctttcaaacttcgctactatacgcgcgggaatcgtggtttggaatgggagaaagtaaacggcgagtaaatttttatgggcttatgcaagcccatgcggttaacagacttctcttatactcttatctttcaaaagaagaaaaagatcaggcctgcaaagagaacaatatcagcgataagcggacagaaaatcccctgccagtgcacggctttcgggcggaagcccacaccgtgaatgacgccagcgcacaccgcccacatcagcaagaaaccatgccagatttcaagcccactggtcttcgccgcaaagcgcgacgggtcccagaagatgcagcctgccagcagcagcgccattaataaggaaagcgcccttaacgggcgcttgtccatcatcgcgtaaagggtcgcgataattttcatcaatgctcttctttacctgctttggtagcttccacgtgctcaagcgccagcgcggtaatcaccccaaaggcacaggcaagcagcgttcccaaaatccatgcgaagtaccacatatatagctccttaccttagtacagcgagtgggtgttcttttcgatgtcttcgcgggtaatgcggccaaacatcttccagtaacaccaggtggtgtagccgaggataatcggcacaaacacgatagccacgtaggtcatcacattcagcgtcagctggctggaggtggcatcccacatcgtcaggctcgcattcagcatcgtgctggacggcatgatgaacgggaacatcgcgatacccgcggtcaggatgatgcaggccagcgtcagcgaggagaacaggaacgccatggcgcctttatctgcttttgtcgacgcgacggtcagcagcggcagcaccacgcccagggcaggaatagcccacagcgctggcatattgttaaagttaaccatccacgcgccggcttcacgcgccacttctttggtcagcgggttagacggaccggtatgatccagcaccgatttcaccacgtaaccgtcgataccgtagtagacccatacgcccgccagcgcgaagcaaaccagcgtcaccagcgccgccaccgtggagacggtgcgggtgcgcagatgcagttcgcctacggtacgcatctgcaggtaggtcgcgccctgcgtcaggatcatcgccacgctgacgatacccgccagcagaccaaacggattcagcagctggaagaaattgccggtgtagtacagacgcagatactcatcaatatggaacggtacgccctgcagcaggttgccgaaagccacgccgataaccagcggcggcacaaagctccccacgaagatgccccagtcccacatgttgcgccagcgggtatcttcaatcttggagcggtagtcgaagcccaccggacggaagaataaagacgccagtaccagaatcattgccacataaaagccggagaacgcggcggcgtataccatcggccaggcagcaaacagcgcgccgccagcggtgatgagccacacctggtttccgtcccagtgcggggcgatggagttgatcatgattcgacgctcggtgtcattacgaccgaggaaacgggtgagcatgcccacccccatgtcgaaaccgtcggcgacggcgaagccaatcagcaggatgccgatcagtagccaccagattaaacgcaatacttcataatcgatcatttgacgactcctgtcttagcgtgccgactgaatagccgcggaggactgttcaaagtgatagcgacccgttttcaggctgctcggtcctttgcgggcaaacttgaacatcaggaacagttcagccaccaggaacagcgtatacagaccgcagatcagcaacatcgagaagatcagatcgcccgcggtcagcgatgagttcgccaccgctgtaggcagcacttcaccaatcgcccacggctgacggccatactcggcaacaaaccagcccgcttcaacggcaatccacggcagcggcagaccgaagaacgcggcgcgcagcagccattttttctcgccaatgcggttacgaatcacggtccagaaagaggcgccgataatcaacagcatcagtacgccgcacgccaccatgatacggaaggcgaagtacagcggcgctacgctcggaatagagtctttggtcgctttagcgatctgctcttccgtggcgtcggcgacgttcggggtatagcgcttgagcagcaggccataaccgaggtctttcttaacatcattgaaccgatcgcgtaccgcctgatcggtggaaccggcgcgcagctgttccagcagcgcataggctttcatcccgttacgaatacgctcttcatgctgcgccatcagatctttcaggccgataaccggcttatccaccgagcgggtagcgatgatacccagcgcgtaagggatctggatggagaagtggttggtttgcgcttcctgatcgggaataccaaacagggtaaaggcagccggcgccggctgagtttcccattctgcttcaatcgccgccagtttggttttctgcacgtcacccatttcgtaaccggactcatcgccgaggacgataacggagaggatagcggccataccaaagcttgcagcaatcgcgaaggagcgcttagcaaaggcgaaatcacgacctttaagcatgtaccaggagctgatagcaaggatgaacatcgcgccagtcacatagccggaggccacggtgtggacgaatttaacctgagcaaccgggttcaggaccagctcagagaagctgaccatctccatacgcatggtttcaaagttgaaatccgatgcgatcgggttctgcatccagccgttggccaccaggatccacagcgcggagaggttagaccccagagcgaccagccaggtcaccgccatgtgctgaactttgcccagacgatcccaaccgaagaagaacagacctacaaaggtagattcgaggaagaaggccatcagaccttcaatggccagcggcgcaccgaagatatcgcccacatagtgagaatagtaagaccagttagtcccgaactggaactccatggtcaaaccggttgcgacacccagagcgaagttgataccaaacaacttgccccagaacttggtcatatctttataaatctgtttgccggaaaggacgtagaccgtttccatgatggccagcaggaacgccataccgagcgttagcggcacaaaaaggaagtggtacatcgcggtcaaggcaaactgtaagcgcgacagttcgactatatctaacatcatgactccttgctcatcgcatgaagactccgagaacgaacccaaaattcaggttcatacgcatgccccaatacaaaattatttgctccctggtacgttactgctcatctggcgatgaaacagtgccctcgcaaaggttacaaatacgttaacgaaaaaaccaaatgattctctaatatattacgccgcaataaccttacaataaataggattttattgttccagctttacatttttcgacggtgatcaatatatagcgaaaatgccctgaataggccaatttgatttgcgacaatttaacgttttttggggattttttccaagtattaagcattgatataaatcaatttttcccgcctatgttaattatgtggcgcaataaagaataacagtgaaattgatgttaaaaatgtgtttaaagtctgccgctagcggttactaaaaagagagagatgagaattataggtaatataattttaactttgaccaatttaaggtaagaaatgatgcgatcctaataatgttagaccggtcacactatttttcccaatcgaaatgcaaaaaataacgtctgcgtttttctgtttattttcacataaaattaaccatctccccgcccccggcaaagcggcgagtgattattcccaataatattcagtaaatcaatataatagcgttttttaacgcaagagagcgcctgcggctgtcgacaaggcaaaaaaaaggccacctgacggtggccaaccatgtcgaaatcggacattagtctgctcctgaggagcagtgagggtttacttgatgatagctttcagcgcttcgccgatatccgccaggctgcgaacggttttcacaccggccgcttccagcgcagcaaatttctcatcagcagtacctttaccgcccgcgatgatggcgccggcgtggcccatacgcttgcctttcggcgcggtaacgcccgcgatgtagccgacaaccggcttagtcacgtgctctttaatgtaagctgccgcttcttcttccgcgctgccgccgatttcaccgatcatgacgatcgcttcggtctgcgggtcttcctggaacattttcaggatatcgatgaagttggagcccgggatcgggtcgccgccgataccgacgcaggtagactggccgaagccgtagtcggtggtctgcttaaccgcttcataggtcagggtaccggaacgggaaacgatgcccactttacccggcttgtgaatgtgacccggcatgatgccgattttgcattcgcccggggtgataacgcctgggcagttcgggccgatcatgcgaacgccagcttcgtccagcttcactttcacggtcagcatatccagggtcgggataccttcggtgatggtgataatcagcttaatgcccgcgtcgatagcctccagaatggagtctttgcagaacggcgccggaacgtagatgacggtcgcagtcgcgccggtggcttcaacggcttcgcgcacggtgttaaataccggcaggcccaggtgggtggtgccgcctttacctggcgttacgccgccaaccatctgagtgccgtaagcgatcgcttgttcagagtggaatgtaccctggctaccggtaaagccctggcagataaccttggtgtctttattaattaaaactgacattatttcccctccactgcggcaacaacctgctgtgctgcgtccgtcagacttttcgctgcaataatattcaggccgctgtcagccagttttttcgcgcccagttcggcgttgttaccttcgagacgtacaacaaccggtacgttaacacccacttcttcaaccgcgccgatgatgccgtcagcgatcaggtcgcaacgaacgataccgccgaagatgttaaccagaaccgctttaacgttgtcgtcagagaggatgattttaaacgcttcggtcacgcgctctttggtcgcgccgccgccaacgtcgaggaagttagccggttcgccgccgtgcagcttaacgatgtccatggtacccatcgccaggcctgcgccgttaaccatgcaaccgatgttgccgtcgagggcaacgtagttcagttcccactgcgccgcctgagcttcgcgcggatcttcctgagactggtcgcgcatttcacgtagatccggctggcggaacagcgcgttgccgtcagcgcccagtttaccgtcgaggcagatcaggtcgccctgcttggtgataaccagcgggttgatttcgatcagcgccagatcgcgctccaggaagatggtcgccagacccatgaagatcttggtgaactgctgaacctgtttaccttccagacccagtttgaacgccagttcgcgaccctggtaaggcatcgggcccgccagcggatcgatggcgatcttgtggatcaggtgcggggtttcttccgctactttttcgatttccacgccgccttcggtagacgccatgaacaccacgcgacgggagctacggtcaacaaccgcgcccagatacagctctttatcaatatcggtcgccgcttcaaccagaatctggtttaccggctggccgttagcatctgtttggtaagtcaccaggcgtttgcccagccaatgctcagcaaaagcgcgaatctcttctttgctcttaactactttcacaccgcccgctttaccgcggccaccagcgtgaacctgacatttcactacccacggacccgcgccgatttttgaagcggcttcttctgcttcacgcggagtagtacaggcataacccaccggcgccggtaagccatagcgggcaaaaagttgttttgcctgatattcatgtaagttcatgtgttcagtccatccttcaggtaataattatctttaaacctgtaggcctgataagacgcgcaagcgtcgccatcaggcatctcatcaacgccggatggcggcgcgaacgccttatccggcctacggtaggtaatactcttactgactacacgtccagcagcagacgagtcggatcttccagcagctctttaatcgctaccaggaagcctaccgattcacgtccgtcgatcagacggtggtcgtaggagagcgccaggtacatcatcggcagaatttctaccttgccattgaccgccatcggacggtctttaatggcatgcatacccagaatggcgctctgcggtgggttgatgatcggcgtggacatcagagaaccgaatacgccgccgttggtaatggtgaagttaccgccggtcaggtcatctacggtcagcttgccgtcacggcctttcactgccagctctttaatattcttttcgatatccgccatgcccagcaggtcaacgtcacgcagcaccggagtcaccaggccacgtggggtcgaaaccgccatgctcacgtcgaagtagttgtgataaaccacatcgtcgccatcgatggaagcattcacttccgggtaacgtttcagcgcttcaacaaccgctttcacgtagaaggacatgaagcccagacggataccgtgacgtttttcgaacgcttcgccgtactgcttacgcagatccataatcggcttcatgttgacttcgttgaacgtggtcagcatggcggtagagtttttcgcttccagcagacgctcggcaacgcgtttacgcagacgggtcatcggtacgcgtttttcagagcggtggcccagttgcgcaaccggcgccgcagcagcggctggcgctttcgcttcagctttcgccggcgcgctcgccagatgtttctcaacgtcttcgcgggtcaggcggccgccaacgccggtgcctttaatcgccgccgcgtcgaggctgtgttcagccagcagacgacggatagccgggctaagcgcgtcgttgctctgctcttccagagacgcttgctgacgctgagccggggtggactctttggtatcagctttcgcatcagcggttttaccggcgctgttgccttcacgcaggcggcccagaatctgacgagacagcacggtggcgccttcgtcttccagtactgcatccagaatgccgtccgctgatgccggtacttccagtaccactttgtcagtttcgatttcgaccagaacttcgtcgcggactaccgcgtcgcccggttttttgtgccaggtggcgacggttgcgtcagctacggactcaggaaggtcgggaaccagaatatctacgctactcattgtgtatcctttaattaatcgacgttcagcgcgtcattgaccagatcttgttgctgtttctggtgaacggacatataccctaccgccggagaggcggaggccgggcggcctgcataacgcagagaggccccaaatggaactacttcacgaaggtggtgctggctgcagtaccatgcgccctggttgagcggctcttcctggcaccagacaaaatcgtggacgtgcgagtaagctttcagcgcttcctgtaccgcctgatgcgggaacggatagagctgttcgatacgcacgatggcgacatctttttgctcgtttttacggcgctgttccagcaggtcgtagtaaaccttaccagagcacagtacgacgcgtttcacggcttgcggatcgagttcgtcgatttcgccaatcgccggcataaaggtgccgttcgccagttcgtccatgctggaaaccgccagcgggtgacgcagcagagatttcggcgacatgaccaccagcggacggcgcataccgcgcagcgcctgacgacgcagcatgtggtaaacctgtgccggagtggacggtacgcaaacctgcatgttctgctcagcgcacagctgcagataacgttccagacgcgcggaggagtgctccgggccctgtccttcgtagccgtgcggcagcagcatcaccaggccgcacatccggccccatttctgctcgccggagctgatgaactggtcaatcaccacctgcgcgccgttggcgaagtcgccgaattgcgcttcccagatggtcagggtgcgtggttccgcggtggcgtaaccgtattcgaatgccagtaccgcttcttcagacagcacggagtcccagacgcggaactggccctgcccgttgtgtacgttctgcagcggcgtataggtagaaccgttgctctggttatggataaccgcatgacggtggaagaaggtaccgcgaccggagtcttcgccggacagacgcaccgggataccctcatcaaccagggtggcgtacgccaggttttccgccgcgccccagtcgaacagtttctcacccgccgccatcaactgacggtcgccgtagattttcgctacgcgagactgcatctcaacggtttccggcaccgtactgatgcgtttggccagctcttgcagacgttttggctcaactttatccgggtagctctcgtcccactcatggttgaggtacggagaccaggtaaaggagtgcatgttcatcggacgccattccgctaccacgcaatcgccggcatccagcgcatcgcggtagaggttaacctgttcggtagcgtcttccagcgtcgcgactttgtcctgttccagcttgtcagcatagattttgcgcggagtcggatgctttttgattttctggtacatcagcggctgggttgcactcggctcgtcggcttcgttgtggccgtgacggcggtagcacaccaggtcgatgaagacatcgcgtttaaaggtattacggaaatccagcgccagacgggtaacgaaagcaaccgcttccgggtcatccgcgttaacgtggaaaatcggcgcctgaaccatcttaccgatatcggtgcagtacggcgtagaacgcgcatccagcgggttggacgtggtgaagccaacctggttgttgataacgatgcgaacggttccgcccacttcgtaaccgcgcgctttggacatgttcagggtttcctgaaccacgccctggccggctaccgcggcgtcgccgtggatggtgattggcagaactttattgctgctcggctcgtccagacgatccagacgggcgcgtacggagccgataaccaccgggctgacgatttccaggtgcgacgggttaaacgccagcgccaggtgaaccagaccgccttcggtttccatatcggaagagaagcccatgtggtacttcacgtcgccggtgccgaggtgttctttatgtttgcccgcgaattcgtcgaacaggtcctgcggttttttacccagcacgttgaccagtacgttcagacgaccacggtgcgccatacccagcaccacttcacgggtgccactcttaccggcgtggcggatgatctctttgagcatcgggattaacgcatcgccgccttccagcgagaagcgtttcgcgcccgggaatttggcgccgagatagcgctccaggccttccgcggcggtcagttcgctcaggaagcgctttttctcttccgcggtgaagctcgctttgcctgctactgactcaatgcgctgctggatccagcgtttttcttcagtagaggtgatgtgcatgtattccgcgccgatggagccgcagtaggtttgcttaagcgccgcgatcaggtcgcccagcttcatcgtgtcttttccgatggcgaaagaacctacgttatagctttcctggaaatcggcctcggtgagatcgtggtaagccggatcgagatccgccactctctcttgctgccacagtcccagcggatcgagattcgcctgctggtgaccacggaagcggtatgcgttgatgagctgcaggactttaacctgcttcacattggtatcagggtcggatatcgaagaagtgtaacgtgaggcatccttcgccagtcgacggaaataatcacgcgttttcgaatgaaattgatccggtttaactccggtgccaggtaactgctggaacatcgaacgccagttggcgtcaacagagtcaggatcggttaagaagtcttcatagagctgttctatccaactctggttcgaaccagagaggtaagaagagtccagccaggctttcattgcgccgttctgcatcgtgatcccttaagcatttttatgcttatttcgccgtagaaactaccacgcacaccgagtgcacgtgccggggttcacttgttgcggacgagttgtggtttctatccgctaaggaacctttaaaaactgtctaactatcaggggcagtttttagaggtttcctgctatatctattgcctgatggcgcttcgcttatcaggcctacaagatacgatcctgtaggccggataagacgtttacgtcgccatccggcaacgaaaacaacttacgcgctgcgctgcagcagcatcgacttaatatggccgatagcgcgcgttgggttcaatcccttaggacacacactgacgcagttcataatgctgtgacagcggaatacgctgaaagcatcgctcagaccttccagacgctcgctggtttcggtatcgcgactgtcgatcaggaagcgatacgcggccagaaggcctgccgggccgatgaacttgtccgggttccaccagaacgacgggcaagaggtcgaacaacatgcgcacagaatacactcgtacagaccatcgagtttctcgcgctgctcaggcatctgcagatgctcgcgagccggaggattttgcccattattcaataagtaaggcttgatcttctcatattgtgcgtagaattgccccatgtctaccaccaaatcgcggataaccggcaatccaggcagcggacggataacaattttcttacccggctgattcagcgcggagatcggcgtgatgcacgccagaccatttttaccgttcatgttcagaccatcggaaccgcacaccccttcacggcaggagcggcggaacgacagcgacggatctttttctttcagctggataagcgcatccagcaacatcatgtcgcgaccttcttccgcttcgagggtgtaatcctgcatatgcggagcgtcgtcaacatccgggttatagcgataaattgaaaactcgagtttcatattcctgtctccgcattaataagtacgaatcttcggcgggaatgccggacgcagtttcggttccatgttgaccgctcgacgcgtcatggattccgactctggcagatacagggaatggcacagccagttttcatcatcacgttccgggaagtcgaagcggctatgcgcgccgcggctttcggtacggaagtttgcggataccgccgtggaataggcagtttccatcaggttatccagctccagacactcgacacgctgggtgttgaactcgctggaagtgtcgtccaggcgcgcatttttcagacgctcgcggatctctttcagtttttccagacctttgtgcatcgcgtcgccttcacggaagaccgagaagttatgctgcatacattcctgcagcgctttacggatagcaaccggatcttcgccggaacgggtgttgttccaacggttgaggcggtccagggaagcttcgacatcggactcgctggcagcgcgcagcgcgccctgctcggcgatggattcctgcagatgcagacccgccgcgcggccgaagaccaccaggtccagcagcgagttgccgcccagacggttggcgccgtgtaccgatacgcaggcgatttcgccaacggcgaacaggcccgggatcaccacatcttcgcccttctcgttcacggtcagcgcctggccagttactttggtcggaataccgcccatcatgtagtggcaggttgggataacaggaatcggttctttaaccgggtcaacgtgggcaaaggtacgagaaagttcaagaatgcccggcagacgggattccagcacttctttacccaggtgatccagtttcagcttggcgtgcgggccccacggaccatcgcagccgcggccttcgcggatttcgatcatgatggaacgcgccaccacgtcacgacccgccaggtctttcgcgttcggcgcataacgctccataaagcgctcgccgtgtttgttcagcaggtaaccgccttcgccgcggcaaccttcggtgaccagtacccctgccccggcgataccggtcgggtggaactgccacatttccatatcctgcaccggaacgcccgcgcgcagagccataccgacgccgtcaccggtgttgatgtgggcgttggtggtggattgataaatacggcctgcaccgccggtcgccagcaccgtagcgcgagctttgaagtacaccacttcaccggtttcgatgcacagagcggtacaaccgaccaccgcgccgtcctggtttttcaccagatcaagggcataccattcggagaagatagtggtgtggtttttcaggttctgttgatacagggtgtgcagcagcgcgtgaccggtacggtcggccgccgccgcggtacgtgccgcctgctcgccgccgaagtttttcgactggccgccaaacggacgctgataaatacggccgtcatcaagacgggagaacggcagacccatatgttccagctcaagaatcgcttccgggccggtcttacacatatattcgatggcgtcctggtcgccgatatagtccgacccttttacggtgtcatacatgtgccattcccagttatcttcatgggtattaccgagcgcgacggtgatgccaccctgcgcggaaacggtatgggaacgggtagggaaaactttagagagcagcgcacaggtctgtccgctctgggaaatctgcagcgccgcgcgcatacctgcgccgccggcaccaattacaactgcatcaaattctctgactggcaatttcattacacaccccacaccacaacaaatccataaagaacgtaagccaccagcgccacaacgataatcagttgcagaactaagcgcacggccagtggtttaacgtagtccgtcaacacctgccacataccgatccaggcgtgaatcaggatggaaacgagagccagcagggtaaagactttggtgaacgcggaggagaagaatccggtccagatttcccaggagatctcaccggaggtggcgaagaagccaaccatgtagatgatgtagagggtcagaacgatggcggtagcacggaccagaataaagtcatgtacgccgttgcgtcccagtgctgaggcgttgcttaccatacgaggactcctgcgagaagtgaaagcacgacagtaataacaaaagaaattttggcggagcgtgtccctgcttcgagggtttcttccagatagccaaagtccatcagcagatggcggataccgacaacggcgtgataagccagcgcggtgaggatgccccacatgatgaacttcacgaagaagctattcatgatggaggcggccgtcaggaagccctccggagaggaaaggctggtgcccagcaaccaaagcagaataccgaccgccacaaaagtgatcacaccggatacgcgatggagaatggacgctatcgccgtgattgggaatcgaatcgtttgtagatccagattgacaggtctttgttttttcacatttcttaccatgaataacgcccacatgctgttcttattgtttccttcctccggtctgcttgcgggtcagacagcgtcctttctataaccagaagtcatgttaaaacccctttccaggagtaaaagcgtgaccaaacaacgctgggtggctcgggattgcagggtgttccggagacctggcggcagtataggccgttcacaaaatcattacaattaacctacatatagtttgtcgggttttgtccggaacagtgatcaaggtcacgattacaacattattttaaattttaatcacatgatttgacaaatattaaacattcttgttacaaacattactagattaatgcaataatgcccaaaagttatggggtcactctttcacctgagaataagttatgtaacagtgtgatggtattgaccgatgtaatcaggacagttattagtggtatacaggttttaatattcgggctgctaaaacgctgatttgctgccgtttcactcccgggctgaagacgtaccatcaagcgcctgcgctctgtaccctgcaattttcgcgacacagagctgtgagcaacataacaatctggtaacgtagtcaggttcgggccgaatgcaaatccaccacccggcagtcttaagcaataaaaggcgctaaggagaccataaatgtctgatgctaaagcaaaaatcaccctgggtggtgacactgctattgaacttgatgtgctaaaaggcacgctcggtcaggatgttattgatattcgtagtcttggttcaaaaggtgtcttcaccttcgaccccggtttcacttcaacagcctcgtgtgaatctaaaattacttttatcgacggcgatgaagggatcctgctccaccgcggtttcccgatcgatcagctggctaccgagtcaaattatcttgaagtgtgctacatcctgttgaacggcgaaaaaccgactcaacagcaatacgacgaattcaaaactaccgttacccgccacaccatgatccacgagcagattacccgtctgttccacgcgttccgccgcgactctcacccgatggcggtgatgtgcggtattaccggcgcgctggcggcgttctatcacgactccctggacgtgaataacccacgccaccgtgaaatcgccgcctatcgtctgctgtccaaaatgccgaccatggcagcgatgtgttacaagtattctatcggccagcctttcgtgtatccgcgcaacgatctctcctacgcgggtaacttcctgaatatgatgttctccacgccgtgcgaaacctatgaggttaacccggtgctggaacgcgcgatggaccgtatcctgatcctgcacgctgaccacgaacagaacgcctcaacctctaccgtgcgtaccgctggctcttccggcgctaacccgttcgcctgcatcgctgcgggtatcgcctccctgtgggggccggcgcacggcggcgccaacgaagccgcgctgaaaatgctggaagagatcagctccgttgaacacattccggaattcgtgcgccgcgcgaaagacaagaatgactctttccgcctgatgggcttcggccatcgcgtgtacaagaactacgatccgcgcgccaccgtaatgcgtgaaacctgccacgaagtactgaaagagctgggcaccaaggacgatctgctggaagtggcgatggaacttgagcatatcgcgctcaacgacccgtacttcatcgagaagaaactgtatccgaacgtcgatttctactccggcatcatcctgaaagcgatgggtattccatcctcgatgtttaccgtcatcttcgcgatggcgcgtaccgtcggctggattgcccactggaacgaaatgcacagcgacggtatgaaaattgcccgtccgcgtcagctgtataccggctaccagaagcgcgatttcaagtccgatctcaagaagtaatttcaaccctgttggggttagcaaaaaaaaatcggggaccttccccgatttttttttatttaagcgtacaaaaaaatttgaatcactcaacaactggcgttagtgctggcagccagggcaccagtaaaagggtcgcgatgacagcatggttttctcaatgatactgccgcagcgttcgcaggcctcaccctcgcgatgaaaaaccttaaagcggaatagcgcgccatgatgtttgttttcatccacttgcccgcgagtgcggtaagaaaggcgcgggatatccagcagcgcgtgcgccagcgcatcgagctgcgtgtcattgagctcggcggccttatgctgcccggtcagccccacctgccacaggatctccacccgcagatagttaccaagcccggcgagaaacgcctggtccagcaacaggccggaaaactggcgattgcgaaatttcgccgataacagccgctctctgacctgcccggcggttaacgtcatatccagcacatccggcccgacccgttgtaaaaacggatgatgggccagctgttgcgccgtcagtatctcaatctcggaggcgctatagagcaaaatcgccttgcgtgcggtctgtaacctgacgcgcagcacgcggttcgattgcggctcaacgcccgcatccaccacgcgccagacgccatacagctggttatggctatacagcgtcaatccgccggagaagtgggttaacaaggccttgccgcgggtggcgatatgggtcacccgctgaccaattaactgagtttgataaggttgcaactgtggaaaggcgaaccaggcttcggttaatggttcgcctttgatagccgcctccagggtatccgccgcgcggcggatctccgggccttcaggcatagtttcgtccttctgttagtgcgtggcgccgccgccaattttgacgtcgtcatcctgttcaagggcgacggcaatcgccgtttccagcgccgcacgtaccgtcgcgaccgacatactcgcctgccccgggtgggccgccgcctgttcaggcagataaggaatatggataaacccgcccttctgcccgctttttccctgcagctgatgcagcaaaccatacatcacgtgattgcagacgaaggtgcccgcggtttgcgacaccgaggccgggatcccctgctggcgcaacgcgctaacgatcgctttgatcggtagcgtactgaagcatgccgcggggccgtcagcgacgatcggctcatcgatcggctgctggcctttattgtcggggatccgcgcatcatcgacgttgatagccacacgttcgacggtaatatcgacacggcctccggcctgcccaacggcaatcgttagctgtggttgataggtttccagcgcggcgttcagcaccgttagcgcctcgccgaacacgcaaggtaactgtttagccaccacctgctgcccgcgaataatcatgccatcaagctgcttaaccacttcccatgaaggattaaccgtttcgccgccgaacggctcaaaaccggtaattaatacgccagccatcatccctccttacaggaacatcaggaaatagagtaagaatacgttgacgatcagcagcaggataccggtcggtacctgggctttgatcaccgcgtttttatccggcagttccagcagcgccgccggtacgatattaaagttcgccgccatcggcgtcatcagcgtgccgcagtagcctgaaaacataccaatcgccgccattaccgccggattgccgccgtgctgcagaactaaaatcggaatgccaaccccggctgtcacaatcgggaaagcggcaaaggcattgcccatcaccatcgtcaacaccgccatgccgatggcgtacacggccacggcgataaagcgattatctaccgccagatagtgctcggtcagccatgaaatgctggttccgacgcccgccgtggtaaatagtagccccagcaccgcgaggatttgcggcaggataaaggcccagccgacggaatcaagcaaacgacgcgcttcctgcatcggctgcgccaccgtttcatgggtcatacgaatcgccatcgccaggccaatcagcgtaccgacggtcatcgagaacagggtaatcagcgtcgcgtggttgcccggcccgaagagcgccacctgccatgaaggcagattgttaaacagcagtacgccaatgacggtgacgaccggaatcgccagcgccggatagaaaagtttgttgccgaggcgtttcgcgctggcggttttctcttcctggctacgctgatggtagctgccgaggcgcacaccgccaaaaccggcgatcagcgccagtaccaccaccaccccgccgacggcgatattcaccgcacgcttatcgcccaccagttgatacgtccagtcgccgagcaagaacaccagcccgtacaggccccagaacaggccggttgtcaggcgccgcggattgcttttgtcgcgccaggacatgatagccacgaccagcagtaccgcgccggccagccaatataaatacgtttgttggaagttcatgccgcaccgcctttcgcctgcccggcgttaacccggtccagctcgcgctggagatggcgatcgaggcgccacaggcgcgcggcgtggatcaggaaggcgcagatcgccgtcgggatcccccacagggcaatatgcaacggctcggtctggatcccgcccgactccagcataaagttgtgcatgaagatgatcgcgccaaaggcgacaaaaatatcttcaccgaagaacaggccaacgttgtcggtcgccgccgacattgcgcgcagccggtagcgcacattgcccggcagcgggccaaagcgcttttccgccgccccttccgccatcggcgccagcagcgggcgcaccatttgcggatgtccgccgaggctggtcaagcccagggcggcggtggcttcgcgcacgaaaagatagacgatcagcagtcgtccggcagtcgcgctatggatcttcgcgatccacgcctgcgcccgctctttcagaccatggcgctccagcagcccgatcaccgccagcggcaacagcagaataaacggcagattacgggtattgaggaagccctcacccagtttctccagaatagtggctattggcatatgcgccgccacgccggtgacgatcccggagataatcaccaccagcaccgggttaaagcgtaatagaaaaccgaccacaatcacggcaatgccgatcagcggccagagggatatcgcctcttgcataataacgtcctgttgagttgtgagtgttgttagttatttgatttaattattattaataatactaaggcggactattaatcaatgtccgcgctgacgtcgatattgcgccctgcgaaagcagcgcgcaagcgtcgggcgaaatcgagcgcatgagcgccatcgccatgcaggcagaccgtttccgccttcacatgcgcccattcgccgctcaggctgcgcacccggttgtgctgcaccatttccagcgtttgcgccagcgcctgctcttcgctctcaatcagcgcgcccggctggctgcgcggcaccaggctaccgtcagcgagataaccgcgatcggcgaagacttcctggcgcgtcgtcagctgatagcgctgtccggcgcggataagctcgctccccgccagcccgaccagcaccagcccggcgtcggcatcgcgcaccgcacgggcgatggcatcggccaaaggcggctctttcgccgcctggttgtacaacatgccatgcggtttgacgtgccgcagctcgccgccctgggcatgcacgattgccgccagcgcgccaatttggtacagcacctgggcgtagaccgtctctggcggtaactgcatcgcggtgcggccgaaattttcccggtccgggaagcttgggtgcgcgccaatagcaacgccgtttttcagcgcctcgcgcacgcactgctgcatgagcagcgcatcaccggcgtgaaagccgcaggcgatattggcggaagagaccagctgcagcagcgcgctatcgctggcgcagccttcgccgaggtcggcatttaaatcaattttcatcgcttaatctccaggccagttgttcaaggtaacgctgctggtcggcgcgcgctttcagcgcgtcttccagcgaacaggggacgaaatggatcggctgacccagcggaatttgcgccagttggtacatatcggcttcaataatgcacgctatacgcggatagccgccggtggtctgcgcatcgttcatcaacacaatcggctggccgttatgcggcacctgtaccacgccgggcagcaggccatgggagagcatttcccggtcggttgtgcgtttgagcggctggccctgcaggcggtagcccatccggttgctctgcgggctaaggcgccacggagaacgccagaaagactcctgcgacacgctgtcgaattcgtgatactccggccccggcagcgcgcgaataatattgcctatcggcagctgtttaacgccgcgcgaggcgctaaagcggcgggaggatttcccaatcttcaattgatcgccatcctgcaaccggcgcccttcgattccgccgataccgactttcagatcggtagagcgggaacctaaaacttcaggaacgtcgatacctcccgccaccgccaggtagctgcggatcccatgctgaggattttttagcaccagccgctgtcctgccttcgcttccattcgccaacccagccagaccggcgcgccgtcgagcgtcgcttcgcaggcggcgccggtcaacgcgaaccagcaatgacgggtaaactgtacatcgacctgacccagcgtaatttccagcgccgccgtctccggcgcattgcccaccagcagattggcaatggtcatcgccggtttatccagcgcgccgcagcggctaattccccactggcgctggccttcccggccgccatcctgtaccgaggtgtacatgccggcgcggataaatttcaacataccccctccttctgcggcacaaagcgcacgcgatcgccagaacgcagcagcaccggctcttcacgctttggatcgaataatgccagcggcgtgcgccccagtagctgccagccgcccggcgtcgccagcggataaataccggtttgcgatccgccgataccaaccgatcccgccggtaccagtacgcgcggctcggcgcgacgcggtatcgccagctgctccggcaggccgccaaagtacggaaaccccggctggaaacccagaaaccacaccatgtactccaccgaagagtgcagttcgaccacctgcttttcgctcaatccgcaatggcgcgcgacgtcgccaaggtctggccccgactcgccgccatagataaccgggatacttatctcacgggattccggctccagcgcttcgctctcttcccaccagcgttgcagcttgtcaatcgcctcccacgccatctcctgcgggcggcgcagtacaacggtgatgttgttcatccccggtatcacttcaaccacttcttcgtggtcggttaaccgctgcgtcaggccccagatacgtttttggctctccagggtcaccggaggctcaagctccaggaccaccgccgtttcacctaatagataacaacgcgctcgctgcacttttttctctctcatcaggccgggttagggatatcaataaaggtgacgtccaggtcggtattttccgtcaaccactcgctcagggcgcgaataccgccacgctcggtggcatgatggccagcggcataaaaatgcaacccttgctcacgggcggaatggatggtctgctcagacacttcgccggtaataaaggcatcgacgccaaagcgggccgcgctatcgataaagctctggccgccgccggtacaccaggcgacgcgggcgactttgtccggcccggtatcgccgcaccacagcggtttacgtcccaatcgcgcttcaatccacgaggccagttccagcccggataccggcatagacagctcgccccacggcaccaatggttcgatttcccccatcacgttgatccccagcagttgcgccagttgggcgttattgcccagttccggatgcgcatccagcggtaaatgccagccataaaggttgatatcgttggccagcaacgttttcagccgattgcgcttcatgccgcggatcaccggcgactcgcctttccagaagtagccgtgatgcacaatcaccgcatccgcctgcagacgcacggcttcatcgagcagcgcctggctggcggtcacgccggtaacgattttccgcaccgactcccgcccttcgacctgcaggccattcggggcgtaatcactgatggccgcgctattcagtttttcgttaattaattgttccagttcgctatttttcattgccgctccatcagaaaatcagtttgtacaaacctataacataaccacatccgcccgagtcgtcgatagcgacgccaaagggtctatttcagccattcgcataatcgcccaaattgcctcttcccctcaccgcgcattagtgtatatttatgcacttataaagcatattaaataaccagaaagccatttaggccatgaataacaccaaacaaacgctattcatgcagaaagatcgactttcgttttacggccaggaaatgaacgttacatgaacagacaaacttcacagccacgggcgatttattacgtcgttgcgctgcaaatttgggaatacttcagtttttacggcatgcgggcgctgttaatcctgtacctcaccaaccagctcaagtacgacgataaccacgcttataccctttttagcgcctactgctccctggtctatgtcacccctattctcggcggcttcctcgccgacaaactgctcggcaaccgcatggcggtgatgctcggggcgctactcatggctatcggtcacctggtgctcggcgccagcgaaatcgcccccaccttcctctatttatcgctggcgattatcgtttgcggttacgggctgtttaaatccaacgtcagctgcctgcttggcgaactgtatgagccgaccgatccgcgccgcgatggcggcttctcgctgatgtacgccgcgggtaatattggttcgatcatcgcgcctatcgcctgcggctacgtgcaggaagagtacagctgggcgatgggctttgcgctggcggcagtcggtatgattgccggtctggtgatcttcctctgcggcggtcgccacttccgccataccaccggcgttaaccgcgaggcactgtgcgcgcggaccttcctcctgccgaactggggctggctgctggtattgctggtggcgacgccgctgttgattaccgtgctgttctggcaggagtggtcggtgtatgcgctgatcgtcgcgacggtgattggcctggcggtactggcgcgtatttacctgcgcgcggagaacgacaaacagcgtaaagagctgcgtctgattattgtcctcaccggttttagcctgctgttctgggcctttgcccagcagggcggcagctccatcagcctgtatatcgaccgtttcgtgaaccgccacgtcatgagctatgaagtaccaaccgcgatgttccagtcggttaacgccttcgcggtaatgctctgcggtatggtgctggcatggctggtcaaagagaacatcaagggcaaccgcaccgtgcgtatctgggggaaattcgccctcggtctggggctaatgagcgccgggttctgcattctgaccttaagcgcccgctggtcggccgcgtatggccactcctccatgccgctgatggtactggggctggcggtgatgggtttcgccgaactgtttatcgacccggttgcgatgtcgcaaatcacccggatcgaaatccccggcgtcaccggggtgctgaccggtatctatatgctgctttccggggcgatcgccaactatctggccggcgtcatcgccgaccagacgtcgcaggcgtcgtttgatgccgcgggcgcggttaactattcgattgaagcctacatcgacgtcttcagccagatcacctggggcgcgctggcctgcgttggcctggtgctggtcatctggctgtatcactccgtgaaggtcaaaacccgccaactggcggtagagtagaaactatctggcggcttcccaggccgccagcgtctccagccgcgcctgcttatggtcaaccagcgggcgcggatacctcagcgttaccccctgtttatccgcccacagccacggctgatgcagcgctttttctggcacttcagccagttccggcagccagcggcgaataaactcgccctgcttatcaaatttctcgccctgggtcgtcggattgaaaatacgaaaataaggggctgcatcggtaccggtcgaggccgcccactgccaaccgccgttgttggccgccaaatcgccgtcgatcagttggctcatgaaatagcgctctccgtgccgccagtcgaggcgcaggtctttcgccaggaagctggcgacaatcatccgcaggcgattgtgcatccagccggtggcgttaagctgccgcatggcggcatcgacgacggggaaaccggtttgcccctgttgccaggcccgcagttcatcctcattgctgcgccaggcgaccttgtcggtccaggcgacaaacggccggcctttacacagtttcggatagtaaaccatcagatgacgatagaactcgcgccagataatctcgttcagccaacttgcgcccgcttcgccatccagtgcgccgggctgctcccgtaacaagcgatgcaggcactggcgcggcgacagtacgcctaccgcgagacacggcgatagcctgctggttccctctatcgccggaaaatcgcgctgctggtcgtaatctgccgccggctgctgacaaaacgcgcgcaatcgagccagcgccgttttttcatccgccgcgaacagatcggtgtcgaacggcgtttgcggatagttgatctcaggcagcggcgaggcctgtcgggtggctgactggcgcggtttcggcgccgccacgcactccggcaacccttcacgcaggcggcggataaaggcatttttaaacggcgtaaagactttatacatctcgcggttgccggtcatcacgctgcccggcggcaacagcacgctgtcatcaaacccctggcaggtgacttctttcaggattttctcaacaccggcgtcgcgctggcgctcattaaactcatactgataattataaaatagatggctaacctggtgctgtttacagaagcgcgtcagcagctcgatgctggcggcgaaatcgtccgcttcttctaccagcagcggaataccgcgttccgctaatgccgcgtgcaggctgcgtaaatggctggcgataaaggccgcctggcgcggcgccatatcatgttggcgccactgctctggcgtggcgatatacagcgccagcacctgcgcctgcggatcgcggcaggcggcggccagcgccagattatcgttaaggcgtaaatccatgcgaaaccagaccaaatgggtggccataaaactcctcactctccgtaagcaaaactcagcactcaggccggcaaaatagcgcgctgcggtaaaatacgcacctgccaattctgccacggcgcgtgaaagctaagtgtagacagcagacgaaaaaaaaccgccggtcgtcaaccggcggttttgatattcgtcgcagcagcgcggatttagtagaagtcatgcgcggctttttccgcctgcgccatccatactggctgttcgctggttttcgcccatacccgatgcagccagctgtaataacgggcgcgatctttccagaacagcattaccggcagcgcagcgaccccggccacgacggcgaaagcgcgacgcatcaggataatgtgagcaggataagctttgtacaacgccataatttctctcccctttgtcaggccggcaagcaacgccggtaaatgtcacaatgtttgtctgcacaaatagtaccgcgctggttgtaattttactactcatccgaccactaaaaagcacttatttatacttaatttacattcacggcgtaactgagttacaaaaaagttaaattaatactaaccattagttaaattgtgcctttagccatttttatactttttttacaccgcccgcggcgatttttgcgaaatctttgcgccgaaattcctaccctctcggtatatcaataagagacacacccggaggtggaaagtgactacaggcatcattgccggcgtaacgctggtgttcctgctgctggcgtatctggtctatgccctgatacatgcggaggcattctgatggccgcgcaagggttcttacttatcgccagcttcctgctggtactgctggtgctggcgcggccactcggttcgctgctggcgcgaatgataaacgacgttccgctcccggggcttgccggcgttgagcgcggtatctggcggctggcggggattcgccgccaggagatggactggcggcagtacttgatcgccattgtgctgtttaacgccattggtctcgcggcgctgatggcgctgctgatgtgccaggggtggctgccgttcaatccgcagcacttccccagcctgtcatgggatttagcgttgaataccgcggtcagtttcgtcagcaacaccaactggcaggcctacgccggggaaaccaccatgagctatctcagccagatggtgggcctggcggtgcaaaacttcctgtcggccgcgaccggtattgcggtgatcttcgtgctgacccgcgcctgggcgcgacagaaagtcagcaccctcggcaacgcctgggtcgacctgacccgcattacgctgtggctgctactgcctctttctctgctgatcgcgctgttctttgtgcaacagggcgtgccgcagaacctgcaggcttatcagccgttcaccagcctggaaggcgttcgccagtggctgccgatggggccggtcgcctcgcaggaagcgatcaaaatgctcggtaccaacggcggcggtttctttaatgccaactcatcgcatccgtttgagaacccgacggcgttaaccaacctggtgcagatgctggcgatcttcctgatcccggcggcgctgtgttttgcctttggcgaagcggtcggcgatcgccgtcagggacgcgccatcctgtgggcgatggcgctgattttcgtggtctgcgtggcggtggtgatgtgggcggaaacccgcggaaatccgcatctgctcagccttggcgccgacagcagcctgaatatggaagggaaagagagccgctttggcattctcgccagcagcctgtttgcggtggtcactactgcggcctcctgcggcgcggtcaacgcgatgcatgattccttcaccgcgctgggcggtatggtgccgatgtggttgatgcagattggcgaggtggtcttcggcggcgtaggctccgggctatacggcatgctgctgttcgtcatgctggcggtatttatcgccgggttgatgattggccgcacgccggaatatctcggcaagaaaatcgacgtgcgcgaaatgaaaatgatcgcgctggcgattctggtgaccccgacgctggtactgctcggcaccgcgctggcgatgatgaccgaagccggacgcagcgccatgttgaatcctgggccgcacggctttagcgaagtgttgtacgccgtcacctcggcggccaacaacaacggcagcgccttcggcggcttaagcgccggcacgacattctggaacctgctgctggcgttctgcatgctggtgggccgcttcggggtgatcgtcccggtgatggcgattgccgggtcgctggtgaataagaaaattcagcccgccagctccggcacgctcgccacccacgacgcgctgtttatcggcctgcttatcgggcacgtcctgctggtcggcgccctgaactttatccccgcactggcgctcggcccgggggcggaacactttccttttctttaagcgatgccgagcagcctgttatgagtcgcaaacaattagccctgctggagccgacgctggtgcgtcaggcgctgctggatgcggtgaaaaaactcagcccctcggtgcagtggcgtaacccggtgatgtttatcgtctggattggcagcgtactgaccaccctgctggcgatggccatggccggggggtatctcacgggtcacaccggctttaccgccgccgtcagcctgtggttatggtttaccgtgctgttcgccaatttcgccgaagccatggccgaaggccgtagtaaagcgcaggccaacagcctgaaaggggtgaagaaaaccgctttcgcccgtaagctgcgcgcgccgcagcacgatgctccgatggatcacgtcccggcggaagagttacgcaaaggcgatatcgtgctggtcgaagctggcgacattatcccctgcgacggcgaagtgatcgaaggcggcgcttcggtagatgaaagcgccatcaccggggaatccgcgccggtgatccgcgagtccggcggcgatttcgcctcggtcaccggcggcacccggatcctctctgactggctggtgatccgctgcagcgtcaaccctggcgaaaccttccttgaccggatgatcgctatggttgaaggcgcgcagcgccgtaaaactccaaacgaaatcgcgctgacgatcctgctgatcgccctgacgctggtgttcctgctggccaccgccaccatctggcccttctcggcgtggagcggtaatgcggttagcgttaccgtgctggtcgcgctgctggtgtgtctgatcccgaccaccatcggcggcctgctctccgctatcggcgtcgccgggatgagccggatgctcggcgccaacgtcatcgccaccagcggccgcgcggtggaagccgccggcgatgtcgacgtactgctgctggataaaaccggcaccatcaccctcggcaaccgtcaggcctcggctttcctgccggctcgcggcgtccaagaccgcgtattggccgacgccgcccaactgtcctcgctggcggatgaaacgccggaaggccgcagcatcgtggtactggcgaaacagcgctttaatttgcgcgaacgcgacctgcagtcgctgcacgccacatttgtcccctttaccgcccagacccgtatgagcggtatcaacatcaaccaacgcatgatccgcaaagggtcggtggacgcgattcgccgccatatcgaagctaacggcggccacttcccggccgatgtcgataagcaggtagaagaggtcgcccgccagggggccacgccgctggtggtggcggaaggcgaacgcgtgctgggcattatttcgctcaaagatatcgtcaaaggcggcattaaagagcgtttcgcccagctgcgcaaaatgggcattaaaacggtgatgatcaccggtgataaccgcctgaccgccgccgccatcgccgccgaagcgggggttgatgattttcttgccgaagcgacgccggaagccaagctggcgctgattcgtcagtatcagtcggaaggacggctggtggcgatgaccggtgacggtaccaacgacgccccggcgctggcgcaggctgatgtggcggtcgcgatgaactccggcacccaggcagcaaaagaggcgggcaatatggtggatctcgactcgaacccgaccaagctgattgaagtggtgcatatcggtaaacagatgctgatgacccgtgggtcgttaaccacattcagtatcgccaacgacgtcgccaagtatttcgcgattattccggccgccttcgccgccgcctatccgcagctggcgatgctgaacgtgatgcatctgcactcgccctcttcggcgatcatgagcgcggttattttcaacgccctgattatcgtctgcctgatccctttagcgctgaagggcgtgagctatcgtccgctgtcggcatcggcgatgctgcgccgcaacctgtgggtttacggcctcggcgggctgattgtgccgtttgtcggtattaaagctatcgacctgttgctgaccctgagcggtctggtgtgaggaaactaccatgtcattaattcgtccggcatttgtgctatttattctgttaaccctgctcactggcggcctgtatccgttgctgactaccgccttagggcattggtggttcccgcagcaggctaacggctcgctgatccagatcgacggcgaggtgcgcggctccgctctgatcgggcagaactttaccgccgccggttatttccatggacgcccttccgcgacggcagaggtggcggataatccgctggcctctggcggcagtaacctggcggtcagcaatccggcgcaggataaagcgattagcgaacgggtagaggcgttacgcgccgctaacccgcaagcgaatccgacggtgccggtcgagctggtgaccgcatcggccagcgggctggataacaacctgacccctgccgcggtgctgtggcaggtaccgcgcgtcgccaaagcgcgcaatcttagcgatgcgcaggtgaaacagttagtggatcaggcaacgcaaaaaccgttgctcagctttctcggtcaacctgtggtaaatatactgcaactgaatatggcgctggatgccctgaaggattaatcaatgagtgacgagccgctgcgcccggaccccgaccgtctgctgcaacaaaccgctgcgccgcatcgcggcaagctgaaggtgtttttcggcgcctgcgccggggtgggtaagacctgggctatgctggcggaagcgcagcggctgcgcgctcaggggctggatattctgatcggcgtggcggaaacccacggccgcaaagataccgccgccatgctggaggggcttagcgccctcccgcaaaagcgcatttcccatcgcggacgctacgtccatgagtttgacctcgatgccgcgctggcccgccgcccggcgctgatcctggtggacgaactggcgcatagcaacgcgccgggttcgcgccacccgaaacgctggcaggacgtcgaagaactgctcgaagccggtatcgacgtcttcaccaccgtcaacgtccagcatcttgaaagcctcaatgatgtggtcagcggtattaccggcgtgcaggtacgcgaaaccgtccccgaccccttctttgacgccgccgatgatgtcgttctggtggatttgccgccggacgatctgcgccagcgcctgaatgagggcaaggtgtacatcggcggccaggccgaacgcgccatcgaaaacttcttccgcaaaggtaatctgatcgccctgcgcgagctggcgctgcgccgtaccgccgaccgggtagacgagcaaatgcgcgcctggcgcgaccgccaggggcaggaaaaagtctggcacacccgcgacgccattctgctgtgcatcggccacaacaccggcagtgaaaaactggttcgcgccgccgcccggctggcagccaggctcggcagcgtctggcacgcggtctatgtagaaacgcccgcgctgcaccgactgccggaggccaggcggcgggcgatcctcgccgcgctgaagctggcgcaagagttaggcgccgagaccgccaccctctccgacccatcggaagaaaaagcggtgctgcattacgctcgcgagcacaacctcggcaaaattgtgattggccgccagggagagcgccgctggtgggaacgagccgggtttgccgaccgtctggcgcgccgcgccccggacctcgatctggtggtgatcgcgctggatgaaaaaccggcctccctgcccgcccgcgcgaacgacaatcgtacggcgctcgacaaatggcgccagcagttgaagggctgcctgctggccgtggcgctgtgcgccattatcaccgtagtcgccatgcagtggctgatggccttcgaagccgccaacctggtgatgctctatctactgggcgtggtgattatcgccctgctgtatggccgctggccatcggtgctggcgacctttatcaacgtcattagcttcgatctcttttttgtcgccccacgcggcacgctggcggtttccgacgtccagtatctgctgacgttcggcgtgatgctgaccgttggtctggtgatcggcaacctgaccgccgggatgcgttaccaggcgcgggtggcgcgttaccgcgagcggcgcacccgccacctgtatgaaatgtcgaaagcgctggcggtcggccgcagccgcgaagatatcgccgccaccagcgaacgctttattacctccacctttcaggcccgcagccaactactgctgccagatgagaacgggcagctgcagccgatggcccagcaatccggcgttttctcgtgggatgatgcgattgcccgctggagcttcgataagggccagccagccggagccggtaccgacactctccccggcgtgccgtatcaaattctgccgctacaaagcgccgcccgcacctggggactgctgctggtcgaaccggaaaatctgcgtcagctgatgatccccgaacagcaacggctgctggaaacctttaccctgctggtggccagcgcccttgaacgtctgaccctgaccgccagcgaagagcaggcgcgcttgaccagcgaacgcgaaagcctgcgcaactcactactggccgccctctcccacgatctgcggacgccgctgacggtcctgttcggccaggcggagatcctgaccctcgatctggccagcgaaggttcgaagcacgcgccgcaggccaacgaaattcgccagcacgtgctcaacaccacccggctggtgaataatttactggatatggcgcgtattcagtccggcggctttaatctgcataaagagtggttaaccctcgaagagatagtcggtagcgccctgcgtatgctggagccagggcttggcggccagcacatccagctgtcgctgccggacccgctactgctggtccacgtagacggcccgctgtttgagcgggtgctgatcaacctgctggaaaacgcgcataaatacgccggcgcgcaggcgcagattggcattcacgccgaagcggataggcagcagttgatcattgaagtctgggataatggtccggggatcccggcaggccaggaacaagctatctttgataagttcgcgcgtggtaataaagaatcggctatccccggcgtcggtctggggctggcgatttgccaggccattgtcgaggtgcacgacggtagcattaccgccagcaaccgtccggagggcggagcctgtttccgtgttacactgccgcgagaatcgcccccagaactggaagagttaaccgaggacatgtgattaacgttttaatcatcgaagacgaacacgctatccgccgctttctgcgcaccgcgctggaagccgacggtatgcgcgtatttgaagccgaaaccctgcagcgggggctcatcgaagccgccacccgcaaaccggatttagcgatcctcgatctcggcctgccggacggggacggtaatgattttatccgtgaagttcgccagtggagccagatgccgattatcgtgctgtcggcacgcagcgaagagcatgacaaaatcgccgcccttgacgccggcgccgatgactacctgagtaaaccgtttggcataggcgaactgcaggcgcggctgcgcgtcgcgctgcgccgtcacggcagcgcgcaggccgatgagccggtggtgcattttgccgatattagcgtcgatatccccgcccgccgtatcatgcgcggcagtgaagaaattcatctgacgcccatcgagtttcgcctgctggcggcgctactgaacaatccgggcaaagtgcttacccagcgccagcttctgaatcaggtatggggacctaacgccgtggagcacagtcactatttgcggatttatatggggcacttacggcaaaaactggaggctgacccggcgcggccgcagcatctgctgaccgaaaccggtattggctatcgctttatgccttgaaggaaacaaatcaatgaccccggcggtcggttaatgccgccggggtaaacaggatcaggcgtttttcagcacttcactgacaatctctaccgcttctttttcaatcagcttgcgatgctcttcgccaaggaagctctcgcagtagattttgtaggcgtcttcggtgcctgacggacgggccgcgaaccagccgttgtcggtcatcactttcagcccgccgatagaagcgccgttgcccggcgccgcggtcagacgcgcggtgattggatcgcccgccagcgtgtcggcgctcaccatttccggcgacagcttagacagcgccgctttctgcgcggaagtggccgatgcctgcagacggttgtagctcggggcgccaaagcgttccgccagctcgttgtagtgctcctgcgggttcttaccggtcaccgcggtgatttccgccgccagcaggcacatgatgataccgtctttatcggtggaccacggcgtgccgtcgaaacgcaggaatgatgcccctgcgctctcttcgccgccgaagccgaagctgccgtcgaacagaccgtcaacaaaccacttgaagcccaccggcacttccaccagcttacggcccagatcgttaaccacgcggtcaatcatcgccgaggaaaccagcgttttaccaaccgcaacgtctttaccccactgcggacgatgctggaacaggtagttgatagccaccgccagatagtggttcggattcatcaggccagccggggtcacgataccgtgacggtcgtaatccggatcgttggcgaaggccagatcgaacttatcgcgcagcgccagcagacccgccatcgcacactcggaggaacagtccatgcggatcgcgccatctttatccaggtgcataaagcggaacgtctgatcgacctgatcgttaacgatggtcagatccagcttgtagtgctcgccgatgcgtttccagtattcgatacccgaaccgcccagcgggtcgacgcccagtttcaggcccgctttctgaatagccgccatatcgacgatatccgccagcccttcaataaacggctgtaccaggtcctgctctttcacgtggccggaagccagcgcggcgtcgagagaaatacgcttcacgccctgcagaccggcggccagcagttcattcgcgcggttctccaccactttagtcacgttggtatcagccgggccgccgtttggcgggttgtacttaataccgccatcttccggcgggttgtgcgacggggtgataacgataccatccgccaacgggccgccttttttgttatgcaccagaatcgcgttggaaaccgccggcgtcggggtgaaaccgttgttttcctgaacgatcacatcaacaccgttcgccgccagcacttccagcacggaaatgaaggccggttcggataaagcgtgggtatccttacccacgtagcacgggccggtgatgccgtttttcgcgcggttttccgcaatcgcctgcgcaatcgccagaatatgctgctcattgaaattgtggcgccctgcgctaccgcgatggccggaggtgccgaacttaaccgcatgctccgcattgcccgcttccggcttcagcacatagtactgagcggtcagctgggcgacgttaatcaaatcactctgttgtgccggctgacccgcacgtttatcgattgccattgcctgatccttctggtgcaaagtttaattaactagatcgtgccgcataccttttcaatcagctccgcagggaactgcattgattgcatgatgtgttcgatcatgctgcatttacggccggtattagtattggtgataacccaccacggcgtaccaggaacctgtttcggtttggtctgattaccgcttttcagcagcgtccgtgagtcttcggcgaagtatacgcgggtgcgtccgtgcagagactcagtggcttctgaaaatgccttgctgtctaacgagtaaagcgtagtcaataccagcatgaagcggttaaccgcgcgcttttgttcagcgtattcgtcagataacagcagctcgcgcatggcgcggactttatctttaaccgggttggccggcttcgcttcgacgactggcgccgccgcaggagcagccgccggcgcggctttcgccgctggcgcgccagatgcaggctgagaaacggcggaaaatttcagcatgcgccgtaaaatgtcggatgcgctctcgccgatatgcagagtgtggctggcaatatagcggtagagctcatcatcaacttcgattgttttcatcttaatccagtgcgatttctttgtttctgaatacaagtcgtcgggattaactatcctttgtctttcacactactgcgcaaaaggcatcagatagaggacaaatcccaaccgcgaatagcgtcaaaccaggatggcgttaaaactcagaatgcttccgggtcttgcagcctaatggcagaatgtccaacataataccctaacccgacggagcgaaaaaaagaactttgccatgaaattaaatagccgagcgcaatctgcacaaaacccgcacaataaatccccaatcgtcctggtacacggcctgttcggcagcctggacaaccttgggatcctcgcccgcgatctggtcgccgactacgatatattgcaggtcgatatgcgcaaccacggcttatcgccgcgttcaccggagatgacctaccgcgcgatggcgcaggacctgctcgataccctcgacgatcatcagatcgagaaagcgacctttatcggccattcgatgggcggcaaagcggtgatggcgctgaccgcgctggcgccggatcgcatcgccgggctggtggcgattgatatcgcgccggtggcttatcacgtccgccgtcatgatgagatcttcgcggcgattaacgccgtcagcgaatccgccgccagcacccgccagcaggcggcgcaggtaatgcgcgagtatataaatgaagaaggcgtcattcagtttctgctgaaatcctttgtcgacggcgcgtggcgcttcaacgtgccggcgctgtgggatcaatacccgcatattgtcggctgggaaaccgtgcccgcctggccgcacccggcgcaatttattcccggcggcaactccccttatgtcaccgatgaataccgcgacgcgctgctggcgcagttcccgcaagcccgcgcccacgtcattgccggcgccggacactgggtgcatgcggaaaaacccgaggcggttttacgcgcaattcgccgttatctgagcacaattgaagcctgagtggctaaaaaacgcccgaccgcgcggcagaatgcccgcggtcgttggcgcagcggttcgcctgatgtattatggcgcgctatctgcgccggctatagcccggcagcttgtttccccgaagtcactctgaatcatggcaaaagaacaaacggaccgaacgacattagatttgttcgcaaatgagcgtcgcccgggtagaccgaaaaccaatccgctttcgcgcgatgaacaactgcgcatcaacaaacgcaatcagctcaaacgcgataaggttcgcggcttgaagcgcgttgagttgaagctcaacgccgatgcggtcgacgcgcttaatgagctggcggaagcccgcaacatgagccgcagcgatcttatcgaagagatgctgatgcaccaactggcctgcctgcgtaaccagggcgaagtctgaaaaacgcaaaaaaatcgctttcatgtagcagagtgtgcaccaggacgttattgctgtttccgcgcccttccctgttctgctatgattgccgttaactgtaggcataatgccactaccacatcattaagtttcaagaggttattttactcatggcaatcatcggcatcttttttggcagcgacaccggcaacaccgaaaatattgcaaaaatgatccaaaagcagctcggtaaagacgttgctgaagttcacgacattgccaagagcagcaaagaagatctggaaagccacgatattctgctgctcggcatcccaacctggtactacggcgaagcgcagtgcgactgggacgacttcttcccgacgctggaagagatcgacttcaacggtaagctggtagccgtctttggctgcggcgaccaggaagattacgcagaatacttctgcgatgcgctgggcaccattcgtgacattattgaaccgcgcggcgcaaccatcgttggccactggccgaccgcgggctaccacttcgaagcgtctaaaggcctggcggacgacgatcacttcgtcggtctggcgattgatgaagaccgtcagccggaactgaccaacgagcgcgttgagaagtgggtgaagcagatttccgaagagctgcatctggaagaaatcaaaaacgcctaagaatcaaacagcgcagctattaagctgcgctgaattaatagataaaagcaatcaaactaatagctacaagtttttaacttttcatcacatatctgtacaatgtcctctgattccacgaggtcacgtgacacagtttgtagctggtaattcgtttttgacagcttacaaggcgcgatggttgcagttttcatttcagagtagcagctctataatgagacgcattacatcgggtgattctctgtattgcttccctttaaaggaagccgatctttagcaacaggacagattccgcatgactgacaacaatatcgcattaaagaaggctggcctgaaagtcacacttccccgactgaaaattctggaagtgttgcaggaaccggataaccatcacgtcagtgcggaagatttatacaaacgcctgatcgatatgggtgaagagattggtctggctaccgtttaccgcgtgctgaaccagttcgacgatgcaggcatcgtgactcgccacaacttcgaaggcggtaaatccgtattcgagctgactcagcaacaccaccacgatcacctgatttgcctcgattgcggcaaagtgatcgagttcagcgatgattctatcgaatcccgccaacgtgaaattgctgcgcaacacggcatccgcttaaccaaccacagcctgtacctctacggccactgtgcggaaggcgactgccgcgaagatgaacatgcccacgatgcggtgaataaataatttcccgtctcgtatgtaatgaaaagccaacctgaaggttggctttttttatgggcgaaatccgcctgaatgcgtattctgtcagagcctaacgccttgtacggagagtcactatggagctgcgccagctacgctattttgtccgcatcgtggaaacaggcagtatgggccgcgccgcgctcgatctgaatattggcgtctctgcgctcagccagcaaatggcgcgtctggaaaatgaactcgctatccgcctgctgcaacggacttcgcgcggcgtaatgcccaccagcgccggcctcgccttttactcgcaggcgcaactggcgctgcgccatgctgacgatgccattctcgcagcgcgtgaagcacgcctttccggtcacgtcagcgtcggtatggcgccgagcaccgcttctgtgctgggcgtaccttttatcaacgccatgcgcgaaagctacgccgacgtccgcctgcacctggtggaaagcctctccggcaatctggaacggatgatcaacacccgccagctcgatttagccatcgttttccagaaagagaagatcctgcgctggagcgcccgacccattcttgaggaacgtctgttcctgattggcgcccatgacgtgctggcgccgctgcccggcgatagcatctctccggaccagcttgccgccatcccgctgattatgccaagccagggacatggcctgcgcggcaggctggacgctatttgccaggagcacgccatcaacgttgacgtggtggctgaaatcgatggcctggccctgctgatgcgcgccgtccgtgacgggctcggcgccacgctgcagccgggcgcggcgatttctcatctcgacagcgaggcgctaagagtgatcggcgtcgataatccggtactaagccgacctaattttctggtcagtctctcagatgacgaactcaccccggcaggccttgccgcgcgcgtgatactgaccaaagtcatgcgtcagcttgtagaaactggctgctggccgggcgccagcctttacacttcctaaacccctctttagctttacgccatagcgcctgtcgctcctgcgccttacatttccattacaaatttaacaattagtcaaagcgtaatggagccgataatggtggatgtactggtgattggcggcggcaacgccgcgttatgcgccgccttaaccgcccgggaagcaggcgcatccgtactgctgctggaagccgcgccgcgggaatggcggggcggtaactctcagcacacgcgtaacctgcgttgtatgcacgatgcgccgcaggatgtcttagtagacagctacccggaagaagaatactggcaggatctgctgcgcgtcaccgggggcaacaccaacgaagcgctggctcgcctggtgatccgcacttcgtcgcaatgtcgggactggatgcgccgtcatggcgttaactttcaaccgcccttatccggcgccctgcatgtcgcccgcaccaacgccttttttatgggcggcggtaaagccctggtcaatgcctattaccgcagcgccgagcagatgggcgtgcagatccgctataacacgccggtgcaggcgcttgaattacgtgatggcgaattcgtcgccgcgctggcaggcgccgagcggatcgccgcgaaaacctgcgtgctcgccgccggcggttttgaatctaaccgcgagtggctgcgcgaagcctgggggcaaaatgagcgcggcgagtggcctgccgacaactttctcatccgcggcacccgttttaaccagggggtgctgctcaaatttatgatcgacgccggagccgatatcatcggcgatccttcacagtcgcactgcgtcgccattgacgcccgggcgccactctatgacggcggcatctgtacccgcgtcgactgcgtgtcgctgggggtggtggtgaaccgcgatgccgagcgcttttatgatgaaggggaggatttctggcccaaacgttacgccatctggggccgtctggtcgcccaccagccggggcaaatcggctattcgatcatcgacagtaaagccgttggacagtttatgccgcccgtttttccgggcgcccaggccaataccatcgcggaactggcccgccaattggggctggatggcgaacgtttgtcgcagaccatcgccagctacaatgccgcctgtacgccaggccagttcgaccatacccgtcttgataactgcgctacctccggcctgacgccgccaaaaacccactgggcgcggcctatcgatacgccgccttattatggttatgccctgcgtccagggatcaccttcacctacctcgggctgtacgtcaatcaacacgccgccgttcactttgccggtaagccgagccgcaacctgtttgtcgccggcgaaatgatggctggcaacgtactgggcaaaggctataccgccggcgtaggcatgtcgatcgggaccacattcggccgcattgccggtcagcaagccgccctggcggcgcagcaggagaaacatcatgaagtcgcttgaaaagctgatcatcgaggcgcaaatcatcaccgaaccggaggcggaagtcgaacgggtgatgcaggtctgtaacgcctgccgctattgcgaagggttttgcgccgtattccctgccatgacccagcgtctggcattcggcaaggcggatattaactatctggcgaacctgtgccacaactgcggcgcctgtctgcacgcctgtcagtatgccccgccgcacgagtttgcgattaatgttcccaaagcaatggcggaagtgcggctggaaacctatcaacattacgcccggcccgccgctttcggcagtttatatcgccgtgcggggatcgccacggtgctggcgctggtcgcgggtcttgttctgtttctgctgctggcgatggggcttaaaggttcgctgctgcacccgccgctggccggtgatttctaccagattttcccgcataacctgctggcgtggatgttcggttcggttttcattgtggccattggtttattgatgagcggggtgattcgtttctggcgcgagatctcgcctggccaaccgcaagctggtgatatcgccagggcctcgcatgatgcgctgacgttgaaatatctcgacggtggccacggtaaaggctgtaacgaggccgatgatgccttcacgctgatgcgccgccgttttcaccacttcaccttttacggctttatgctctgtttcgccgccacgctggtggctacgggctatcactatttcgccggctgggaagcgccctatccgttcttcagcgtaccggtgctgcttggcacacttggcggcatcgggctactggtgggcccggcgggtttgctatggctgaacctgcgccgctcgccgctgcacggcgacgcacggcaaaaaccgatggatcgcgcttttatcctactgttgctgctgaccagttttaccgggctcgcgctactggtgggccgggacacctcgtggatgggcattctgctcgctatccatctcggggtggtgatggcgctgtttttaacgctgccttacggaaaatttgcccacggattttatcgctgtgcggcgctactcaagtgggcgattgagaaacgccgcggaaaacaggcggcagtcgcaggtgactaacccgcccctcttacctctataaaaacaagataaagacaatggagagcacaccctatgacccaaccaacctcgcgcgccggtaccttcggcgcaattctccgcgtaaccagcggtaattttctcgagcaattcgacttctttctgtttggtttctatgccacctatatcgccaggaccttctttccggcagagagtgagttcgcggcgttgatgctcacctttgccgtatttggttccggtttcctgatgcgccccatcggcgcggtggtattaggagcttatatcgacaggatcggtcgccgcaaagggctgatggtcaccctggcgattatgggctgcggcacgttactgattgcgctggtgccgggctaccaaaccatcggcgtgctggcgccggtgctggtcttaattggccgtttgttgcaaggattctcggccggggtcgagctcggcggtgtgtcggtctacctgtcggaaatcgccaaaccggggaaaaaggggttctataccagttggcagtccgccagccaacaggtcgccatcgtcatggcggcgctgattggctacccgctgaacgagacgctgggtcacgacgagattgcagaatggggctggcgcattcccttctttatcggctgcctgattatcccgctgattttcgtgctccggcgttcgctgcaggagaccgaagcgtttctgcagcgtaagcatcgtcccgataccaaagagatactgaccactattgttaaaaactggcgcatcatcagcgcgggcaccttactggtggcgatgaccaccaccaccttttattttattaccgtctataccccaacttatggcagagcggtactgcatctgagcgcacgcgacagcttgctggtcacgatgctggtcggtatctctaactttatctggttgccgattggcggggcgctgtcagacaaaataggccgccgtccggtactgatgggaattaccgtcctggcgctgctgaccacctggccggtgatgcaatggctcaccgccgcgccggatttcacccgcatgacgctggtgctgctgtggttctcgttcttctttggtatgtataacggcgcaatggtggcggcgctaacggaagtgatgccggtctacgttcgcaccgtgggcttttcgctggcgtttagcctcgccaccgctatcttcggtgggctgacgccggctatctctaccgcactggtcgaaatcaccggtgataagagcgcgccaggctggtggctgatgtgcgcggccctatgcggattcgccgccaccgccatgctgttcatgcgtctgagccgcggctatcagccagcggaaataccgcgttaaaatagcgacgggcggagtgtgcgctccgcccgtttacgcttaactgtctgctttatttagtggtgttattactgcgaatctcctgccagattttatcgcagcgcgctttgaccgcctggtcattaccggtgcgcgtcgcctgaatacaggcctgataatccagcactctgacgctctcctgcgtcgcaaactgctgatgcggtttctcttccttcaggacgttgagtacgctctgacaggcttcaatcttgtccggattaccttctgccgtgttgatacaggcgctataggcatctttcaatttggaatcttctttcggcgctggcgatggcgcgcaggcaaccagacccgatgccatgatggcgatgagcagcaactttttcatagttattctcccagaggggcggcaggctcacgcccgccgcgcaggcatcagaaaatggtgaacggcgcgataaccataaacttcacgtcacgctcatcctggaagatgttgccgtaaccaccgctccagcttgggatgtcggagtggttgtcgtattgcgtgaagtgcagtttgaacatcgttcctttcgcccggccttcctgcagggtgtagatagcatccagactgtaggcggactctttcagacgatagttaggatcgtagtaagcatccggggatgccattctgccaggcttcgcatcccaggcgtaaacataggaagcgccaaacgcccagcccggcatatcccagttcttcatgtcatacatcgcgccgaagaatactgctttctcgccgttggcgttaaagtcggagcggttatcccaccagatatcgagacgaccattagaggaggcataggttggcgtcatacgctgcaggaagtagccctgctgaccatcggctttaacccaggtcccttccagacgcagatccagcacatcggccgctttatagccaaaggtgatcgcctgcagccacgcggtgccgtcgtagatgtcgttgacgccgccgttgctgactttatcgcgggtaccatagaactgatagctggcgcttaacggcgaaccggcaatatcaaatttgtagctggccttcgcaaagtattgatcgatataaccttcagcctggccaaaagcggcttccagcactagatcgtttttaaaatcgtatttcgcgccaagagagtgcagatagtcgaccttggttttcttatcgttctggtagaaatcatccatctcgatatgccacggcgctttatattcgttggtccacatgtaggagaaactcagcgcgccgttatcgccatagtcgaagttggctccggcttccgccccctgataggtacccggcataaagctccagtgcggcgccagcagcgtttgcccggtcggctggatataacccgcgcgcgcccacgccgggccgaatttaaatttagccgctgctttatacaggctaatcccgctcttatcgccggtataatcttcactgtaggcacggttactggaggagaaggcaatttcgttcgggtggccgctgtcgccgttttccgccatttctatcgcggtaaaggcagcaatatcaatcccgaacatatcagcggcatagccggactggaaatccaggttggcgttccaggtagaatgggaaaggttggtttcatacttgtcggtttctacgtttttacggtcgcgctcgcgctgccagtaatagataccgccagttaaagtagaatcatcgataaagcctgttgcgctggcctgtggagccacaacccaacccgacatcgcggtgacggcggcaatagccagcgccagcgtactacgtttgccactaaacgtacgcatgtgcatatcctctttgacgttttaaaattgcgattgccaaaggcagctcgctaaaaaaataaaaaagtactaaaagcggtgcggttaaaagtccgcgaaaccactatggatagactatttttcgtgacgcgaattatcaatctctttcgcagagcaaagcttaagattatgacaaagcgcacataatttatgtctttttgttacagacttacttctcagcttttttaacgataagtcatggttatatcgaaaaaaaattgatagttgccggaagctgaaacggttaaatgtaaatacaccggcaggaagagatgggaaattattacggtattttaataagattaattcgcatcgaaaaaaatatcgatttttaattcactgattctgaaataaaaaaacgccgcagtgtgcggcgtttcatgaatacggtgagcattactcgccgattttagcccaggtgtcacgcaggccaacggtgcggttgaagaccagatggccctcggtggcgtagcggctgtcgaggcagaagtaaccttcgcgctcgaactggtatgctttacccgcctgcgctttcgacaggctcggctccgcgaaaccttgcttgatgaccagagattccgggttcattaccgccaggaagtcatccgccgcgcccgggttcggcacgctaaacagacggtcatagaggcgaatttcaaccgacagcgcgtgcgccgcgctcacccagtggataacgcctttgaccttgcggccatcggccgggtctttactcagggtatcggcatcgtaagtacagaagatggtagtgatgttaccctctgcatctttctcaacgcgttccgctttaatcacgtaggcgttgcgcagacgcacctctttacccagcaccagacgcttgtactgtttgttggcttcttcgcggaagtccgcgcgatcgatccagatctcagcgctgaatggtacttcgcggctgcccatctccggcttgttcggatggttcggcatcgccaccatttcgcttgcgccctgcggatagttttcgataaccagtttaaccggatcgatcaccgccatcgcgcgcggcgcgttttcattcagatcttcacgaatgcacgactccagcgacgccatctcaatagtgttgtcctgcttggtcacgccgatgcgtttgcagaactcgcggatggattcagcggtatagccgcgacggcgcagcccggaaatagtcggcatacgcgggtcatcccagccttccacatgcttttcggtcaccagctgattcagcttacgcttggacatcacggtgtattcgagattcaggcgcgagaattcatactgacgcggatgcaccggaatactgatgttgtcgagcacccagtcgtacagacgacggttgtcctggaactccagggtacacagcgagtgggtgataccttccagcgcatcgctgatgcagtgggtgaagtcgtacatcgggtagatgcaccatttgttgccggtctgatggtgttcggcaaatttaatgcgatacagcaccggatcgcgcatcacgatgaatggcgacgccatgtcgatcttcgcgcgcaggcaagccttaccctcttcaaaaccgccggtacgcattttttcgaacagcgcgaggttctcttccacgctgcgatcgcggtacgggctgtttttacccggttctttcagggtaccacggtattcgcggatctcatcggcggacagttcgtcaacgtaggccaaacctttgttgatcagttcaaccgcatactgatgcagctgatcgaagtaatcagaggagtagcagacatcgccggaccagtggaaacctaaccactgcacgtcgtttttaatcgactccacgtattcgatatcttctttcaccgggttggtgtcatcgaaacgcagattacattgaccttgataatcctgagcgatgccgaagttcaggcaaatggattttgcatggccaatgtgcaggtaaccgttcggttccggcgggaagcgggtatgaacggtggtgtgcttaccggtagccagatcttcatcgatgatctgacggataaagttagtcgggcgggcttctgcctcactcatcacgggttcctcaaagcgtaaacaacgtataacggcacatgatcttacaagcagggcgcagagacaactattagttacgcaaaatacgtatctgttgttggatatgggggtatttgctgcaaaaaaaagcggcgcaggtttcgctgcgccgctgaggcaaaactctactcaggagccttacttgcctttaatctcgaacaacggcgtttggccggcgacaacgttacccgttgcctgaatcaccagcgcgctgtaatcatcgctgttgctgcagacgaccggactgatcatcgagcgggcgttggcgttaaggaacgccatatccatttccaggatcggctcgccggctttcacctgtgcgccctcttcaaccagacgtttaaagcctttgccttccagcgcgacggtatcaatgcccatatggacgacgatttccgcgccgttatcggtttccaggcagaatgcgtggttggtgttgaagattttcaccaccgtaccggccgccggcgcgacaacgatgttatcggtcggtttcaccgcgataccgtcaccaacggctttgctggcgaaggcttcatccggcacctgctcaagcgccaccacttcaccggtgatcggggaaaccagcgcttcgacggttttggcgttcgcgaccgcctgcggtttggccgcaggcgcggcggctggcgcgctgtcagtcgaagcagccgcagcagcaaccggaccacgggcaaccactttcttcatggcgtcgccaacggattccgctttcgcgccaacaatgacctggatggtctgtttgttcagtttcaccaccccggaggcgccgagacgtttacaggcggcatcgttgactttcgccgagtcgccgacggtcagacgcagacgggtgatacaagcatcaatggctttcaggttatcggtaccgcctacggctgcgatgtagttggtcgccagctgagtcagaccttcttcggtgttgctgttagcttcttcagtcacgacgtcgtcggttttatcttcacgacccggcgttttcaggttgaacatgcggataaccgcgctgaacaacaggaagtaaacgaagaagaacaccacgcccatcaccagcagcatccagacgtttttgctggctgccggcaggctatacatcaacacgtagtcgatagcgcccgcggagaaggagaagcccgcgtggatacccagcgccgttgcgatgaacaggctgataccggtcaggatagcgtgcaggaggtacagcaatggcgccaggaacatgaacaggaattccagcggctcggtcacaccagtcaggaacgcggtgatggccacggacagcagcataccgccgaccatcggacgacgctctttcggcgcagccatgtacattgccagcgcagcgcccggcagaccgaacatcatgatcgggaagaagccggacatgaacatccccgcggtgccgtcaccggcatagaagcggttgatgtcgccgtggaagaccgcacccgcggcgttggtgaactcgccaatctggaaccaggcgatggtgttcagcacctgatgcagaccggttgggatcagcagacggttaatgaaaccgaagataccggaacccagcgcgcccgcagacacgatccattcaccgcccgcatgaatagcgtgctgcaccggcggccagacatagccgaagatggcagccagcaccagacagaagaagccggtagcgatcggtacgaagcgtttgccgccgaagaagctcaggaagtctggcagtttaatgccggcccagcggttataaacagcacccgcgaccagaccggtaatgatacccgccagtacacccatgttaatttccgggttgatggtgaccatcgctttggtcatcacgaaataacctaccgcgccggccagcgccgcagaacccgcgttatctttggaccagcttgatgccacgccgatggcgaagatcaacgctaagttgtcaaagattgccccacccgcttgcgcgatgaagggtacgttcagcagatccggttgcccgaatcgcagcagcaatgccgcgaccggcagcactgcgatagggagctgtaatgccctacccagccgctgaaagaaacctaaaatattcatcttattccccctatgagaccccgatgaggctcatttcaaagccacttttttattgtgtaacaaggtcggatttatcacttaccggcaaagtgtgtgaaaaattaattcgtatcgcaaattaaacgggtattttttgtgactataatcaccaaatatcgtattcccccctccctttgactggctaacatcgaaaacttattttatcattcaaaaaatcaacacggattgaccccggtcggcgcagttgctgcaatactcttcatagtatgctggcgccaatccgccaggttctaatttaactatagaggtgaagaatgagactgatccccctggtaacagctgaacaagtaggtaaatgggctgcccgtcatatcgttaaccgcattaacgcgttcaaaccgaccgcggaccgtccgttcgtactgggtctgcctaccggtggtacgcctcttaccgcttacaaagcgctggttgaaatgcataaagcaggccaggttagcttcaagcacgttgttaccttcaacatggatgagtatgtcggcctgccgaaagagcatccggaaagctatcatagcttcatgcaccgcaatttctttgaccatgttgatattccagctgaaaatatcaacctgctgaatggtaatgcgccggatatcgatgcagaatgccgtcgttatgaagaaaaaatccgctcctacggtaaaatccacctgtttatgggcggagtaggtaacgatggtcatatcgcgtttaacgaaccggcctcttctctggcgtcccgtacccgtatcaaaaccctgacccatgacacccgcgtggccaactcccgcttcttcgacggcgatgtggatctggtgccgaaatatgcgctgaccgtgggcgtgggtaccctgctggatgcagaagaagtgatgattctggtgctgggccatcagaaagcgctggcgctgcaggcagcggtcgaaggtaacgtcaaccacatgtggaccatcacctgtctgcagctgcatccgaaagcggttgtggtctgcgacgagccgtccacgatggaactgaaagtgaagaccctgaaatatttcaacgaattagaagctgaaaatattaaaggtctgtaatgtagtccgtcccgcgccctggcgtgggaccatctttttctttgtatgcaacgccagaacaatgcgaattgagctggtggggcgtatataccgggggtcgtaatgtatgcattaacccagggccgggtttacaccggtcatgaaattctcgatgaccatgcggtcgttatcgccaatggccgtatcgaacgtctctgtccgctggctgatttgccgtctgaaattgagcaacgctcggtcaacggcgcgattattgcccccggtttcatcgacgtccagctgaacggctgcggcggcgtgcaattcaacgatagtccggatgcggtcaccgtcgaaacgctggaaattatgcagaaagcgaatgagcgttccggctgcaccaacttcctgccgacgctgattacttccagcgatgatctgatgaagcaaggcatccgcgtcatgcgcgaatacctgcaaaaacaccccaaccaggcgctgggtctgcatctggaagggccgtggctgaatatcgtcaagaaaggcacccataacccggactacgtgcgtaaaccggacgccgcgctggttgatttcctgtgcgacaacgccgacgttatcaccaaagtgacgctggcccctgagcgcgtcgagccggaagtgatccgtaaactggtcgccgccggcatcgtggtttcggcaggtcactctaacgctacgctgaaagaagcgaaaatcggtttccgcgccggtatcacttttgcgacgcacctttataatgccatgccgtacattaccggccgtgaaccgggtctggccggcgccattttcgacgagccggatgtctactgcggtattatcgttgacggcatgcacgtcgattatgccaacgtgcgtaacgctaaacgcctgaaaggcgataaactgtgcctggtgactgacgccaccgcgccggcaggggctaatattgaccagttcatttttgctggtaaaacaatatactaccgtaatggtctgtgcgtggatgaaaacggcactctcagcggttcttcgctgaccatgattgaaggggtacgtaacctcgttgaacattgcggcgtagcgctggacgaagtgctgcgtatggcgacgctctacccagcgcgcgcgattggcgtggacaagcagctcggcagcattgcgccgggtatggtcgctaacctgaccgctttcagccgcgattataaaatcatcaagaccatcgttaatggtaacgaggtcgtcactgagtaagtaaaagtatgacagcaggcggacaagctcaaattggtaacgtcgatctggtaaaacagctgaacagcgcggccgtctatcggctgattgaccaacatggtcccatctcgcgcattcagatagcggaacaaagtcagcttgcccctgccagcgtaaccaaaattacgcgtcagcttattgagcgcggcctgatcaaagaagtcgatcagcaggcctccaccggggggcgccgcgccatctctatcattgcggaaacccgcaatttcaacgctatcggcgtgcggcttggccgctatgacgccaccctgaccctctatgatttaagcagtaagacgctggaagaagagcacttcccgctgccggagcgtacccaggaaacgcttgagcacgcgctgctgaatatcatcgccacctttattgaaaattgtcagcgcaaaatccgcgagctcatcgccatttcggtcattctgccggggctggtcgatccggaaagcggcgttatccgctatatgccgcacattcaggtagagaactggggtctggtcgaagcgctggaaaaacgctttaacgtcacctgttttgtcggccacgatatccgcagcctggcgttggccgagcactattttggcgcaagccaggattgcgaggactctattctggtgcgcgtacaccgcggtaccggcgcgggcattatttccaacgggcgcatttttatcggccgtaacggcaacgtcggcgaaattggccatatccaggttgacccattaggcgaacgctgtcactgcggcaacttcggctgtctggaaaccgtcgccgcgaacgccgctattgagcaccgcgtccgccatctgcttgagcagggctatcaaagccgcatcacgcttgatgactgcaatatcaaaaccatctgcaaagcggcaaataaaggcgatgcgctggcctgtgaagtggtcgaatacgttggccgtcatctgggcaaaaccatcgccatcgccatcaacctgtttaatccacaaaaagtggtgattgccggtgaaatcgtcgaggcggaaaaggtgctgctgccggccatcgaaagctgtatcaacggccaggcgttgaaagcctttcgccacaatctgccggtggtacgctcgacgctcgatcaccgctccgccatcggtgcctttgcgctggtcaagcgcgcgatgctcaatggcatcctgctacagcatttgctggaaagttaatccagctttatagtttcgcctttcgttaatgatgttggactgtccatgaccattcaaaacgtaatttgtgatatcgacggcgtgctgatgcacgataacgtggctgttcccggcgccgctgaatttatcaaacgcatcctggaaaaaggcatgccgctggtgatgctgaccaactatccttcgcaaaccgggcaggacctggccaaccgcttcgccaccgccggtatcgaagtgccggataccgcgttctacacctccgccatggccaccgccgatttcctgcgtcgccaggaaggtaaaaaagcctatgtggttggcgaaggcgcgctcatccacgaactgtataaggccggcttcaccatcaccgacgttaaccctgatttcgtcatcgttggcgagacccgctcctttaactgggaaatgatgcataaagcggctttctttgtcgccaacggcgcgcgtttcatcgccaccaacccggatactcacggccgtggctactaccctgcttgcggcgcactctgtgcgggaatcgaaaaaatctccggccgtaaaccgttttatgtcggtaagccgagcccgtggattatccgttccgcgcttaacaaaatgcaggcccactccgagcaaacggtgatcgtcggcgataacctgcgtaccgatatcctcgccggcttccaggcgggccttgagaccattctggtgctctccggagtctccacgctggacgatatcgacagcatgccgttccgcccgtcgtggatttatccgtcggtcgccgaaatcgacgttttttgagccgaaaccacgtccctggacgtggttttttattttgggtgccgccaaaaatagattcatctaatgaaaatggcttatcgctaaacaatcatcaataaagccgagttaaacatactcatttttcaacatccggcaatcagcattgcactttttacttttctgccggtaaatctcttgcgccccactctcctttacggcattttctttaacacgcactaagaccttgcaagagacgaggtctgcataacatcactacacgacagggtaacggagaaggctatgtgttctatttttggcgtactggatattaaaactgacgcaggcgaactgcgtaaaaaggcactggaactttcccgcctgatgcgccaccgcggaccggactggtccggcgtttatgccagcgataaagcgattctcgcccacgaacgtctgtcgatcgtcgacgtcaacgccggcgcccagccgctctataaccaacaaaaaacccatgcgctggcggtcaacggtgaaatctacaaccaccaggcgctgcgcgccgaatatggcgatcgctaccagttccagaccggttccgactgtgaagtgatcctcgcgctgtaccaggaaaaagggcctgagttcctcgatgaactgcaggggatgtttgccttcgcgctgtatgacagcgagaaagacgcttatctgattggccgcgaccatatcggtattattccgctgtatatgggccacgacgagcacggcaacttctacgtcgcctctgaaatgaaagcgctggtgccggtctgccgcacgattaaagagttccctgcgggtagctacctgtggagccaggatggcgaaattcgccagtactatcagcgcgactggttcgactacgacgcggtaaaagacaacgtcacggataaaaacgaactgcgtcaggcgctggaagagtcggtgaagagccacctgatgtccgacgtaccttacggcgtgctgctctccggcggcctggactcgtcggtgatttcggccattaccaaaaaatacgccgcccgccgcgttgaagatcaggagcgcagcgaagcctggtggccgcaactgcattcattcgcggtcggcctcgaaggctcccctgacctgaaagcggcgcaggaagtcgcaaaccacctcggcaccgtgcatcacgaaattcactttacggtacaggaagggttggatgcgatccgcgacgttatctatcacatcgaaacgtacgacgtgactaccattcgcgcctcgacgccgatgtacctgatgtcgcgtaaaattaaagccatgggcattaaaatggtgctctctggcgaaggttccgatgaagtattcggcgggtatctctacttccacaaagcgccgaacgctaaagaactgcatgaagaaacggtgcgtaaactgcaggcgctgcacatgtttgactgcgcccgcgctaacaaagcgatgtccgcctggggggtagaggcccgtgtaccgttcctcgataagaaattcctcgatgtggcgatgcgcatcaacccgcaggataaaatgtgcggcaacggcaaaatggaaaaacatattttgcgcgaatgctttgagtcctatctgccagccagcgtcgcctggcgccagaaagagcagttctccgacggcgtgggctatagctggattgatacgctgaaagaagtggcggcaaaacagattagcgaccagcagctggagacggcaagcttccgcttcccgtacaacacgccgacctctaaagaaggttatctgtaccgcgaaatcttcgaagagctgttcccgctgcccagcgcggcggaatgcgtacccggcggcccgtccgttgcctgctcttcagcgaaagccatcgagtgggatgaagcgttcaaaaccatgaacgatccatcaggacgcgcggtcggcgtccaccagtcagcttataaataagcaatcaacacgcatagcggaccctacggggtccgccaggctgctgacaaagaaggaaaaagcgtggtttttccttctttgtggctatcagtcgaaaatcaatgaattgattttccttgttatttgcctgtcgctatctgcaaacctaacgatgtataaggtttgtcatcaatctcacggaccctacggggtccgttttttttatgccaaaattggcaaataaaaacgataaataatcaattcttgccgattattgcagcatgctgttcgcaacctaaccaaacagtcacattacgacgattttccttgaaaaagtggttgacgctcgcaggcccaatacgcataatgcgccccgcaacgccgataaggtaacgcgaaaaaaagatggctacgtagctcagctggttagagcacatcactcataatgatggggtcacaggttcgaatcccgtcgtagccaccatcttttttgcgggagtggcgaaattggtagacgcaccagatttaggttctggcgccgcaaggtgtgcgagttcaagtctcgcctcccgcaccattcaccaaaaagcgttgcacggatggggtatcgccaagcggtaaggcaccggtttttgataccggcattccctggttcgaatccaggtaccccagccatatttcttcgatatttgcggttagccgcgacggtattggggtatcgccaagcggtaaggcaccggtttttgataccggcattccctggttcgaatccaggtaccccagccatcgaagaaacagcatgacaatttggctacgtagctcagctggttagagcacatcactcataatgatggggtcacaggttcgaatcccgtcgtagccaccatattcaggactatcggttaatatcggtaaatccgtaaaaatttgttggggtatcgccaagcggtaaggcaccggattctgattccggcattccgaggttcgaatcctcgtaccccagccaaattcaaaagacgttcctctgtgaacgcagcctgttggggtatcgccaagcggtaaggcaccggattctgattccggcattccgaggttcgaatcctcgtaccccagccacttattaacaaaaaagctcacttcggtgagcttttttgctttctgcggatagtcatcttgccgatgcaggtactgcaaaactttagtctgcagcccccatcggcaaatgcccctttacaaccctaatgcatatttcaatgcctggcgctttaatacaccggcacgttcggcagccatcaggccaatattacgcaacacgcgcaccggcgctaaatcgttgctgaagccggcatagaacagatccatgccggattgcataataaagttatccgcccggcgccgcgcctgatagcgcttcagcaccggcaagctggaccaggcttccccgcgcccgcgggcttccgccaaaatatccagcagcgcgtcaacgtcgcgatagccaaggttaaccccctgccccgccagcggatgaatggtatgcgccgcatcccctaccagcgccagccccggttgcacgtactgcagcgcatgtcggcgggttaacgggaaggcgccggcgctcattggcgtcacgctgcccagacgtttcgggaaatgcgcggtgatttcctgctgcagttgggtcatcgacatcgcctgcagctggcggatgcgcgccggggtgtcgtaccacaccagcgacgcccagttatcgaatagcggcaggaaggcgcgcggcccgctgggggtgaactgttgccaggtgctatcaccgggatcgtcggcgcactgcacgctaattagcatacaggattgctgatattgccacgcctgtacgccgatgccggccagttcgcgcacctgagaattcgcgccgtctgcgccgatcgccagttgcgccgtgcaaacgctctcatcgctcaggcgcagcgaaacgccctgcggctcacgatgaagttcgcttaacgtcacgccaacccgcaagctcacctgcggatgggcttcaagcgcctgccacagcgccagctgtagcacgctattttccaccatatagccaagctcaggcagcttcagctcggcggcattaaagtcaacgtgcgcgctttcccattcccaggtttcaagacgacgataagcatgcgcgcgcataccgcgcaccgcttcccaaacgccgaggcttttgagcaagccgaccgacgacgcgctgatcgccgaaatacgcacatccggcgccgcagcggcatcaaaggccggaggcgcgtgtttttctatcaccgtcaccgaaaacccgtgttgcgccagccccagcgccagcgcgccgccgaccattccgccgccgacgatggcgatatctgttgcatgaattgtcatggcaattatccttaaagctgatttccttaagtttaccggattttttgcaccttgcgggggatcgtggtcgcactggtcaggtggcaaccaaagcattacaatgcgtaccctgcaaacgaattctaattcttaacttatacccgtctttataattgagcatgagcaagtcgatgacaaaaaaactccatattaaaacctggggctgtcagatgaacgaatacgattcatccaagatggccgatctgctggatgccacccatgggtatcaactcacagaagtggccgaagaagcggacgtgctgctgctcaacacctgctcaattcgcgagaaggcgcaggaaaaagtgttccatcagcttggccgctggaaactactgaaagagaaaaaacccggcgtgattatcggcgtcggcggctgtgtcgcctcccaggaaggcaaactgattcgccagcgcgcccattacgttgacattatttttggcccgcagacgctgcatcgcctgccggagatgatcgacgcggtgcgcaataaccataaaccggttatcgatgtgagcttcccggaaatcgaaaaattcgatcgcctgccggaaccgcgcgccgaggggccgaccgccttcgtttccattatggaaggctgcaacaaatactgcacttactgcgtggtgccctatacccgcggtgaagaagtgagccgtccgtgcgacgatattctgtttgaaatcgctcaactggcggcgcaaggggtgcgtgaagtcaacctgctcgggcagaacgttaacgcctggcgcggcgaaaactacgatggcacgaccggcaactttgccgatctgctgcgtctggtcgccgccatcgacggcatcgaccgtattcgcttcaccaccagccacccgattgagtttactgacgatatcatcgaggtctatcgcgatacccctgagctggtgagcttcctgcatttaccggtgcaggctggttccgatcgcgtactgaacctgatgggccgtacccacaccgtgctggaatataaagcgattatccgcaagctgcgcgaagcgcgcccggatattcagattagctccgactttatcgtcggtttccctggcgaaacgacggaagacttcgaaaaaaccatgaagctgattgccgaggttaactttgatgtcagctacagctttatcttctctgcccgcccgggcaccccggcggcggatatggtcgacgatgttcctgaagccgataaaaaacagcgcctgtatattctgcaggagcgtattaatcagcaggcgatggcatggagccgccgcatgctcggcaccacccagcgtattctggtagaaggcacgtcgcgtaagagcctgatggagctctccgggcgcaccgagaacaaccgcgtggtgaacttcgaaggcacgccggatatggtcggtaaattcgtcgacgtagaaatcgtcgatgtctacactaactcattacgcggcaaaattgtccgcacagaagatgagatgggactgcgcgtcgtggaatcgccggaatcggtcattgcgcgtacgcgaaaagaaaacgatctgggcgtcggcatctaccagccgtaattccggcaggcctgtcgcttccggcaggccttgcatttcccctcctcgcccctatatctacagcaatgcttgcgccatattcccgtgacgtgaataatttccttattggccggatgacgattgttctccggcaacacacgtaataagaggaacagtttgaacatagaaacccgtgaaattaccctggagccagcggacaatgcccgcctgttagcactgtgcggcccgtttgacgacaacatcaaacagctggagcgtcggttgggtattgagatcaaccgccgcgacaatcactttaaactgaccggccgcgccatctgcgtgcacgccgcggccgatattctgacaagcctgtatgtcgataccgcgccaatgcgcggccagattcaggatattgaaccggaacaaatccacctggctattaaagaagcccgggtcctcgagcagagcgccgagagcgtgccggaatacggcaaggccatcaatatcaaaaccaaacgcggggtgatcaaaccgcgtacgccaaaccaggcgcaatacatcgccaatatcctcgaccacgacattacctttggcgtcggcccggcgggtactggtaaaacctatcttgcggtcgccgcggcggtcgatgccctggagcgtcaggaaattcgccgcattctgctgactcgtcctgcggtcgaagcaggcgagaagctcggcttcctgccaggcgacttaagccagaaggttgacccgtatttgcgcccgctgtacgacgcgctgttcgagatgctcggctttgagaaagtcgagaaactgattgagcgtaacgtcattgaagtcgcgccgctggcctacatgcgcgggcgtacgctgaatgacgcctttatcattctcgacgaaagccagaacaccaccatcgagcagatgaagatgttcctgacccgtatcggctttaactcgaaagcggttatcaccggcgacgttacccagattgacctaccgcgcaataccaaatcaggtctgcgccacgccgtcgaagtgctggcggaagtcgatgaaatcagcttcaacttcttccacagcgaagacgtggtgcgccatccggtggtcgcccgcatcgtcaatgcctatgaggcatgggaagaagccgaacaaaaacgtaaagcagaactggccgccgagcgcaaacgcgaagcccaggaacaggagcaaaaatgagtcaggtgattctcgatttacagctggcctgcgaagacaccagcggtctaccggacgaagccctctttcaacgctgggtggatgccgtcatcccgcagttccaggaagagtcagagttaacgattcgcctggttgatgtcgccgaaagccacgagctgaacctgacctatcgcggcaaggataagccgactaacgtcctctccttccccttcgaagccccgccgggcattgagatgccgctgctcggcgatctgattatctgccgccaggtggttgaacaggaagccaaagagcaggaaaaaccgctggaggcacactgggcgcacatggtcgtgcacggtagcctgcacctgctgggctacgatcatatcgaagatgaagaagcggaagaaatggaaggcctcgaaacagagataatgcttgctctgggctatgaggatccgtacattgccgagaagattgctgaatagtaacttgccggatgacggcgcaagcgccttatccggcctacattcatgcgtatcccaggcctgataagcgtagcgctatcaggcgaaacatgccgtacgacgctgagtttacgcgcgacgagcgacaattaaatcaacacgagaacccatacgacgccatgagcgacgacaattcacacagtagtgacacagtaaacagcaaaaagggatttttctccctcttactcagccaacttttccacggtgaacccaaaaaccgtgatgaattattggcgctgatccgtgactccgggcagaacgagcttatcgatgaagatacgcgcgacatgctcgaaggggtaatggatatcgccgaccagcgcgtccgcgatattatgatcccgcgttcgcaaatgattaccctgaaacgcaaccagacgctggacgagtgcctcgatgtgatcatcgaatccgcccactcgcgtttcccggtcattagcgaagataaagatcacattgaagggattctgatggctaaggatctgctgccgtttatgcgcagcgacgccgaagctttcagcatggaaaaagtgttacgtccggcggttgtcgtgcctgaaagcaagcgggttgaccgcatgctgaaagagttccgctcgcaacgttatcatatggcgatcgtcatcgacgagttcggcggcgtctctggtctggtgactatcgaagatattctcgaacttatcgtcggcgaaatcgaagacgaatacgatgaagaggaagatatcgatttccgtcagctaagccgtcatacctggacggtacgcgcgctggcatcgattgaagatttcaataaagcctacggcacccacttcagcgatgaagaggtcgataccatcggcggactggtgatgcaggcctttggtcatctcccggcccgcggcgagtcgattgacattgatggttaccaattcaaggtcgcaatggctgacagcagacgtattattcaggtccatgtaaagcttcctgatgatgcgccgcagccgaagctggaagactaatttaacgggacgattaacctaaatggtatttgcctctttacttgaacgccagcgcgtacgtctgctgctggcgctgttattcggagccagcggaacgctggctttttcaccttacgacttctggccagcggcgattgtctcgctgtttggtctgcaggcgctcactctcaaccgtcgcccgctacagagcgcctggattggctacttctgggggcttgggctattcggcaccggtattaactgggtttacgttagcatcgcgcagttcggcggcatgccgggcccggttaacgttttcctcgttgctttgctggcggcctatttatcgctgtacaccggtctgttcgccgggatcctcgcgagactgtggccgaaaaccaactggatccgtctggccattgccgcgcctgtcatctggcaaattaccgaatttctccgcggctgggtgctgaccggtttcccgtggctgcagttcggctatagccagattgacggtccgctaaagggcctggcgccggtgatgggcgttgaggcgataaactttctgttgatggtggtcagcggcctgctggcgctggctatcgcgcagcgtcactggaaaccgctgctggtggcgatagtgctatttgctctgcccttcccgctgcgttatatccagtggtatcaactgctgcctgagcgggcgacggaagtctctttggtgcagggcgatatcccgcaggcgatgaaatgggatgaaaaccagctggtaaacaccctgaaaacctatctcgatctcacccagccgcatatgggtaaatcgcagctgattatctggccggagtcggcgattccggatctggaaatcaatcagcagcatttcctcagtatggttgatgacctgatgcgggcaaaaaatagctcgttgattaccggtattgtcgatgcgcgcctcaataaacaaaaccgctacgatacctacaacaccatcatcacgctgggtaaagataacccgtacagctacgactcgaccaatcgctataacaaaaaccatctggtgccgttcggcgaattcgtaccgctggagtcgattttacgacctctggcgccgttcttcgatttgccgatgtcctcgttcagccgcggcccttacgtgcagccgcagctggtagcgcataacctgaagcttacggcggcaatttgctacgaaatcattctcggcgagcaggtccgcgataatttccgcccggataccgattatctgctgactatctccaacgatgcgtggtttggtaagtcaattggcccatggcagcacttccagatggcgcggatgcgcgcgctggaactggcgcgcccgctgctacgcagcaccaacaacggtatcaccgccgttattggcccgcgtggtgaaattcaggacatgatcccacagtttacccgcgcggtgttgaccactaaggtcacgccaaccaccggcctgacgccgtatgctcgtaccggcaattggccgctgtgggcgttaaccgccctctttggctttgccgcgctggtgatgagcctgcgccagcgtcgacgctaatctttaccgccgggcagccgcccggcctgctcccggcggcattcgtcgccggcggaccttccccgctttacgctctccagcgccaatctggcacgtccattgcttaatttcatccctgtaggcgattttgaccgcggttgtaccagggttgcaccgaaagcgttcgcacttcgcgccacgttggtgcaacaacccttttttgcccacaaatggtgcggtgcgcttcgcaaaaataaacaataacgcatcaaaatctttacattaagccaaactaaatgctaacaagctcatacaaatactgcactttaagattgcagacgattcccgaaagcgccgccttacggcaatgctcacaggaataacaacacatacacacaatcacaatgggtatcactagcgtccctggcgttaaggataaggagttggatatgcaattacgtaaactggccgccgcaatgctggtcatgggagtgaccgctggtctggcgcacgctgaagatgccgccccggccgcaggtcagagcacgctggataaaatcgccaaaaacggggtgatcgtcgtcggccaccgcgagtcgtcagtaccattctcctattacgataaccaacaaaaagtggtgggttactctcaggattactccaacgctatcgttgaagccataaagaaaaagctgaataaacccgatctgcaggtgaaactgattccggtcacctcgcagaaccgcatcccgttactgcagaacggcacttatgatttcgagtgcggttccaccaccaacaaccttgagcgtcagaagcaggccgccttctccgataccattttcgtcgtcggcactcgtctgctggtgaaaaaaggtgggccgattaaagacttcccggatctgaaagacaaagcggtagtcgtcacttccggtactacctcggaagtgctgctgcataagctgaacgacgagaagaaaatgaacatgcgcatcatcagcgcgaaagatcacggcgactctttccgtacgctggaaagtggccgcgcggtggcctttatgatggatgatgccctgctggccggcgagcgcgcaaaagcgaagaaaccggataactgggaaatcgtcggtacgccgcagtcgaaagaggcctatggctgcatgctgcgtaaagacgacgcatcgttcaaaacactggtagatgacaccgttgcccaggcgcagacctctggcgaagcggcgaaatggttcgatacctggtttaagaacccgattccgccgaaaaatctgaacctgaacttcgaactgtccgacgacatgaaggcgctgttcaaatcacccaatgacaaggctcttaactaattaaaaaaacaggggctcgataaagtagccctcccgattgttgcctttgcacggacagactatacggtggctggtcgttccccagccgccgcgaataccgaaacaagcagggcaacaatcttcgagggtagcgctgctacccttttttttctggagtttatttatgtcaatagactggaactggggaatattcctgcaacccgccccgttcggcaacaccacttatctaggctggttatggagcggctttcaggttaccgtcgcgctgtcgattagcgcctggattatcgctttcctcatcggctcgctgttcggtattctgcgtaccgtccctaaccgctggttagccgggatcggcacctgctacgtcgaactgtttcgtaacgttccactgattgtccagttctttacctggtaccttgttattccggagtttctgccggaaaacatcggcatgtggtttaagtcggaactggatccaaatattcagttctttgtctcctcaatgctgtgccttgggctgtttaccgctgcccgcgtctgcgagcaggtccgcgccgcgatacagtcccttcctcgcgggcagaaaaatgccggcctggcgatggggctgaccctgccgcaaacctatcgctacgtgctgctgccgaacgcttatcgcgttatcgtgccgccgatgacctcggaaatgatgaacctggtaaaaaactcggctatcgcttccactatcggtctggcggatatggcggcgcaggcgggcaagctgctggattactcagcccacgcctgggaatcgtttaccgcgatcaccctcgcctatgtattcatcaacgccgtaatcatgctggtgatgtatgtggttgaacgtaaagttcgcctgccgggcaatatgggaggcaaataatgtacgattttgactggagttcaattgttccttccatgccctacctgctggcagggttggtcattacgctgaaaatcaccgtcacggcaattattatcggtatcgtctggggcaccattctggcggtgatgcgcctgtcaagcttcctgccgttggcgtggtttgccaaaacctacgttaacgttttccgctcgattccgctggtgatggtgctgctgtggttctatctgatcgttcccggattcctgcaaaacgtgctggggctgtcgccgaaaaccgatattcgcctgatttcggcgatggtggcattttcgatgtttgaagcggcctactattcggaaattattcgcgccgggatccagagtatttcccgtggtcagtcgagcgccgcgctggcgctggggatgacccactggcaatcgatgaagttggtgattctgccgcaggccttccgcgcgatggtcccgctgctgttaacccagggtatcgtcctgttccaggatacctcgctggtgtacgtcctgagcctggccgatttcttccgtaccgcctccaccattggcgaacgtgacggaacccaggtggaaatgatcctgttcgcaggcgccgtttattttgtatttagtctcagcgcatcgctgttggtcagctggttgaagaaaaggactgtgtaatgattaccctgaaaaatatttcaaaatggtatggtcactttcaggtgctgaccgattgctccaccgaagtgaaaaaaggcgaggttgtggtggtttgcgggccgtcaggctccggtaaatcgacgctgattaaaaccgttaatggccttgagccggtgcagcaaggcgaaattatcgttgatggcactcaggttaacgataagaaaaccaatcttgctaaactgcgttcccgcgtcggtatggtattccagcactttgaactgttcccgcacctgtcgatcatcgacaacctgacgctggcgcaaattaaggttctcaatcgcgataaagaatcttcgcgtaaaaaggggcttaagctgctggagcgcgtgggtctggcggcgcatgcggaaaaatatccggcgcagctctccggcggccagcagcagcgtgtcgcgatcgcgcgcgcgctgtgcatggatccgatcgcgatgctgttcgatgagccaacttcagcgctagacccggagatgatcaacgaagtactggacgtgatggtcgagctggctaacgaaggtatgaccatgatggtggtgacgcacgaaatgggctttgcccgtaaagtggctaaccgggttatctttatggatgaaggtaaaattgtcgaagatgtcgataaagaagccttcttcgccaacccgcaatcagaacgcgcgaaagatttccttgccaaaatcctgcactaaattaccagcgcgcacgtcatgtgcgcgccttttctccctcgataatgtgtgccatatattagttgtttattttaattgttttcttattaaaccagtgaataatttaacactcccccctaacaaatcacattctaaattaatttaattcatacaaaattcagttttcttcgcatggctaagcgttaccgccaccgctaacataccccccttaagaacaagccctgggaatatttcccaacacaaaactttctgataataaaaaataatatttttatggatgaccctataccctgaataaggccgtgttttaagcaagcttagcaatacagcatgcaaatttaatgaaacaaatggaacttgcttcatgtttaataaaaaaaatctgattcacaccctgctgattgtgtttttgtgtcagcagcaggttttcgccagtacgatagtctccaccacgactaaccaaaacgagcaggataaagcccgtcaggcggcgctgacaccacagcagcaggccgcccaggcttcactaattaataccgaccgacaaacgctcacgtttccaaaggaagaaaactgcaggttcatcaataatattcatatcgattctgccgagccgaagctcacgcatcagcttcttgacaaccttacagctcaggctctgcatcgttgtctggggattaacggtattcagcacctcaccatggcattacaaaatgagttaatcgcccgtggttacatcacttcattactgaccatcccggaacagtcattgacggagggcacattaaggctcgaactcgcttatggcaaaatcggtgatattttctggtcaacgacaagcgagcaaaccaccagcatctggaacaatatccccaccggcaagggagatatcctgcggctctccgacctcgaacagggaatggaaaacctgcgccgcctgccaggaagttcggcgaatatgcaaatattaccgggacaacgggaggcagaaagcaatctgcagctaacgcgtcggctggataaaaaatggcaggtggcagcctggatggatgacgctggcagccgcgccagcggtcgctatcaggccggaggtgcgctctatctttatgatatcaccacactcaacgacattttctatgtctcaggaggaggagatatcgagtttaatcaacataatgatggtaaccagaatggcagtctgtattactcgattcccttcggttactgggcgttaggtctttacggttcacagagccaatatcgccagttgttcaggggcaactggtcgcaaacggattataaaagtaaaaatcgctactatagcgcgacgctgtcacgactgctgtctcacacccgtcagcaaaaaacgtcgctggatttccgtatctcaaaaagtacatcacactactattttggcggtgaagaacttagggtgatgcgcaaacagaacccgacatgggagctgacgctacgacagcaacgctatttcgataaaaaagtcgtcgccgccagcctggggttacagcgccgcctcccatggctaaactccgtcgccacaccggaagaaaaagcaggccagttcagtaagcgctcacgcgtagtacatgccgatttgcaggccttaatgaaattcgatttaaccggagatagatttagctatgcaccgcattttaatgcgcaatatagcccggacattctctcttcggataaccaatttaatattggcaaccgctggacggttcgcggatttgatggcgaatatactctctctggcaatcagggatggtactggagcaatgatttcatctgggatattgccggcccggaacagcaattctatttaggattagatattggtcgtattatcggcagtgaacaatatcggcaaggaaaagttatttcaggtgccgttagcggattgcgcggtgatatattctcaacacaatatgattttttcatcggcacaccgctaagtaaaccagataactttagtagtgactcattcaatatgggtttctcattgaagtggaagtattaacacaacctatttttcactatatttaaaggaataaattcatgtttaagtttaaattaacctatgttgctttagcagcagcgttaagctcgacggtggtgtacgccgatccgtcgacttacacccatctatcaggcgcaacggtggttgatattgaagcgccgaatgctgcaggcgtttcgcacaacctgtatcgtgaatttaacgttggcagcaacggtttaatactcaataacagcgacagcgatattaatcatgcgacttttggcaatattgccaaaaacaacaacctgaccaatggcggcgcatcggtgatcctgaatgaagtcacctccaataaagccagttcattaaatggcttcattgaagtcgccgggctgaaagccgacgtggtaatcgctaaccctaacggtattacctgctccggctgtagtttcgttaataccaacaaggcaatattaacgacaggtcaggtgaatttgaccgatgaaggcgctatcggcagctataccatcaccaatggcaaaatcaccatcggtgaaaatggcatgaacgctgctaacagctatgctgctctactcgccgacgcgattaaaattaatggtaaagtgcaggccaagaacgcccttgttagtgcaggtaatttcaccatggataacagttctggcgcggtgacctcagcgggtaaaaaagcgaccctgatcgaaatgacgattaacccgcaatacagcatcgacgtcagtagtcttggcggcattactgccaacagcattagcatgattggcaataacattggttttggcgtacgtaataatggctctattatctcaaacagctcactgcaactcaccagctacggaaacctgataaataaagggacgataaaaggaaacggtctgctaagccaggtttctacggtcacaggtatcaccaatgaaggcagtatcggcggagccaattatttaatgctctccagtggggattatatcgttaacgtcggttctatcactggcggtcagctaattgccaccgctaacggcaacatcactaacggcgactctggaacgatgaccggaaccagtgggttaagcctggccagcggtggaaaaatccgtaatgaggctaaggcctccctgctgtcgaataaccagatttccgccacggcaataggcgattttctgaatgaagggaaaatcagtgctaaaaacaccacccttacttttgttggcgagagttttaaaaataccgggaacattaattcaaccggcaacaccaccattcagtctcttaagcaggatggcaccgtaaatgtcggggaaatctacaatctgggtaatatcactggcgaaaacatcaatctacaaaccaacggcacactggcgcaaagcaccagtggcaaaatgaccgcaactaacgcgattaccgcgcacagctattggttgaataataatggctcgatgcaagcgcaaagtattaccagcgatcatggcccggtcaataataccggcagcatctccgcacataatatttctatcaccacttatgcggatattgttaatgaaggaaccatttacagtagcggggatttagttctggatacgcaaaaaagaggcaatatctataactacagtctgatcgatgcggatggcaccctgacgatgacggcgaaaaaggtagtcaacagcggtcgtggttgcggttggtttaaatttaatacctgtgatgtcggcaccatcagcgccaacaagatggtcctcaactcctcgcataaatacgccagtgagatgggtggttatcaatacttcaaggttgcagaaattaataccgtactgtaatgactcagcgatgcgcagcgcaatgcgcatcgctgcttttagcgtttacggctcaaatggccgccgctgaaactggtcatgcccgcatttcgggcagagtggcagcacatccggggtgtataccgccagatggtagtggcacttctcgcataccaggttgccaagacctaccacttccccgctgtgatagactccgtggtggttcagatcctgaaacacctcacgccactcaagctgggttttgtcggtgatatcggcaagctcctgccacaggctctctttgatcacccgcataaagacgctgtcgctatcgtcttcatggctctcttcatagctgcgggcaaattcttccagatcgcgcttcaccgccgcgataagtgactcaacctcgctctgcgtcagatcgcctgcctgggtgattttctccctcgcctgcttcaccagcgcgtcaatgtcacgctctccattgcgcagccgttcactgagcgaggagaccagttcccggtaatattgagcaaccttgttcatcatttcgcctccggtgtgattaactgcttctaataatagacgttatcggcggtttgctttgccatccgcgccacagagtcgcgaaaaattctgcgccgcttttgccgatgttaatgtgcgaaaggctgttttgacgtggacgtttgggctatgctatgccgatctgaaataacacatccattggctacattttgtagctgtattgaaaacaggaccactggctgccatgcaagagcaataccgcccggaagagatagaatcgaaagtccagcttcactgggacgaaaatcgtacatttgaagtaactgaagacgagagcaaagagaagtattactgcctgtcgatgcttccttatccttctggtcgactacacatgggtcacgtgcgtaactacaccatcggcgacgtcatcgcgcgctatcagcgcatgctgggcaaaaacgtcctgcagccgatcggttgggatgcgtttggtctgcctgcggaaggcgcggcggtgaaaaacaataccgccccggccccgtggacctatgacaacatcgcatacatgaaaaaccagctgaaaaagctgggcttcggctatgactggagccgtgaaattgcgacctgcaccccggaatactaccgctgggagcaaaaattcttcaccgagctgtataaaaaaggcctggtgtacaaaaaaacctcagcggtgaactggtgtccgaacgatcagaccgtgctggctaacgaacaggttatcgacggctgctgctggcgctgcgacaccaaagttgagcgcaaagagatcccgcagtggtttattaaaatcaccgcctacgctgacgaactgctcaacgatctggacaacctggatcactggcctgacaccgttaagaccatgcagcgcaactggatcggccgctctgaaggggtagaaatctcctttgacgtcaacgactacgccgataagctgaccgtctacaccacccgcccggataccttcatgggctgcacctaccttgccgtcgcagcgggtcacccgctggcgcaacaggctgcggctaacaatccggcgctggccgcctttatcgacgaatgccgtaataccaaagttgccgaagccgatatggcgacgatggagaaaaaaggcgtcgacaccggctttaaagctattcacccgctgaccggcgaagccatcccggtatgggcggctaacttcgtactgatggagtacggcaccggcgcggtgatggccgttccgggtcacgaccagcgcgactacgagtttgccagcaaatacggcctgaacatcaagccagttattctcgccgctgacggttccgagccggatctctccgagcaggccctgaccgagaaaggcgtgctgttcaactccggcgaatttagcggcctggattacgaagcaggcttcaacgccattgccgataaactggccgcgatgggcgttggcgagcgcaaagttaactaccgcctgcgcgattggggggtttcccgccagcgttactggggcgcgccaattccgatggtgaccctggaagacggtaccgtgatgccgacgccggaagaccaactgccggttatcctgccggaagacgtcgtcatggacggcatcaccagcccgatcaaagccgatcctgagtgggcgaaaaccaccgttaacggcatgccggcgctgcgtgaaaccgacacattcgacacctttatggagtcctcctggtactacgcgcgctacacctgcccgcagtacgataaaggtatgctggacccgaatgccgcgaactactggctgccggtggatatctacatcggcggcatcgaacacgccatcatgcacctgctctatttccgcttcttccacaagctgatgcgcgatgccggtatggtgaactccgatgagccagctaaacagctgttgtgccagggtatggtactggccgatgcgttctactacgtcggcgaaaacggcgagcgtaactgggtatcaccgattgacgccaccgttgagcgtgatgaaaaaggccgtatcgttaaagccttcgacccacagggccgcgagctggtgtataccggcatgagcaaaatgtccaagtcgaagaacaacggtatcgacccgcaggttatggttgagcgctacggcgcggataccgtacgtctgttcatgatgttcgcctccccagcagaaatgacccttgagtggcaggaatctggcgtagaaggggcaaaccgcttcctgaaacgcgtctggaaactggtttacgagcatacctctcagggcccggctgtcgccctggatgtggcaagcctcagcgaagatcagcaagcgctgcgtcgcgacgtgcataaaacgattgccaaagtgaccgatgatatcggccgtcgtcagaccttcaataccgccattgccgcggtaatggagctgatgaacaaactggcgaaagcgccgcaggaaagcgaacaagatcgcgcgctgatgcgtgaagcgctgctggccgtggtgcgtatgctcaacccgttcaccccgcatgcctgcttcaccctgtggcaagaactgggcggcgaaggcgatatcgacaacgcgccgtggccggtagcagacgaaagtgcaatggttgaaaacacgactctggtcgtcgtccaggtaaacggtaaagttcgtggtaaaattaccgttgcggtagacgcaaccgaagagcaggttcgtgaacgtgcaggccaggaacatctggtcgcaaaataccttgaaggcgtgaccgtacgtaaagtgatttacgttccgggcaaactgctcaatctggtcgttggctaagcgcgggaggaagcgtgcgatatctggcaacaatgctgttatctctggcggtgttaatcaccgccggttgcggctggcatctacgtagtaatacgcaggttccaaccacaatgaaaactatgattttccagtcaggcgatccgaatggtccattaagccgtgcggtacgtaaccagctacgtctgaatggcgtagagctgatcgaagccgatacgctgcgtaaggatattccgtccctgcgtctgggtaactcatccattcagaaagatacggcatccattttccaggatggtcgtactgctgaataccaaatggtgctgaccgttaacgccaccgtattgattccgggccatgacatttacccaatcaataccaaggtttatcgctcgttcttcgataacccgcaggcggcgctggcgaaagatgccgagcaggacatgattgttcgtgaaatgtacgataaggctgcggaacagttgatccgtaaattgccgagcgtgcatgtcgcggatgtcgaagccactaaagaggctgagcagccggtgtctggtaccccggccacctcaacctctggcaaccgcgtctccactacgctgggtaactgatgattcggttgtacccggaacaactccgcgcgcagctcactgaagggctgcgcgcggcgtatttattgcttggtagcgacccattgctgttacaggaaagccaggatgcgatccgcgaagccgcggccgcccagggctttaccgaacatcacaccgcgaccatcgatgccagcaccgactggcccgcccttttttccttaagtcaggcgctgagcctcttttccagccgccagacgcttctgcttatcctgccggaaaacggcccgaatgcggcgatcaacgaacagctgtccacgctggtcggtatgctgcatgaagatctgctgctgattgtccgcggcaacaagcttaccaaggcgcaggaaaacgcggcgtggataacagcgcttgccagccgcgccgtgcaggtgagctgccagacgccggaatacgcgcagttgcctcgctggctggccgcccgcgctaaacagaatcagttgcagttagatgaggccgccagccaactgctgtgctactgctatgaaggcaacctgctggcgctggcgcaggcgctggagcgcctctctttgctgtggcctgacggtaaactgacgctgccgcgcgttgaacaggcagtgaatgacgccgcccactttacgccgtatcactgggtcgatgccctgctggccggcaaaagcaaacgcgtactgcacgtcctgcaacaactgcgccttgaaggttgcgaacccgctattttgctgcgcacgttgcagcgcgaactgctgctgctggtcactctgaagcgccagtcggcacatacgccgctgcgcacgctgtttgataaacaccgggtctggcagaatcgacgtcagctggtcggcgacgcgctcacgcgcctcagcgccgaacagttacgccaggccgttacgttattaacccgcgccgagctcaccttcaaacaggactacggccagtcaatatggcccgagctggaaagcctttcgttactgctctgccataaagcgctggcggacgtttttattgatggttgatatgactcagttgcaggcaatgtacggcggcaccttcgatccggtgcattatggtcaccttaagccggtagagattctggcaaaccaaattggtcttagccgggtcattatcgtgcccaataacgtgccgccgcatcgcccgcagccggaagccaccagcgcccagcgggtgcatatgctggagctggcaattgccgataaacccctattcgttctcgacgaacgcgagctacagcgcgatacgccgtcctggactgcgcaaacgctacaggagtggcggcaagaacaaggcccggaacagcccctggcatttatcatcggccaggactcgctgctgaccttccccacctggcataactacgccacgatcctcgataacgcgcatctgatcgtctgtcgccgtccgggatatccgctggcgatgaagcgcgaagaagatcagcaatggctcgataaacatctcacccacgatgtcgagcagttacataaccgccccgccggagctatctatctggcggaaaccccatggttcgatatttccgctacgctgattcgccagcgtctgcagcagggcgtctcctgcgccgatatgctgccggccgccgtactggactatattcaccagcagaagctctattgctgagaaccggctgcgaggatatcgttacgctacgcgatttccacggagtgcatcatgaaattatggctggttcgccacggcgaaacgcaggctaacgtcgacggactgtatagcggacatgctcccaccccccttaccgaacgcggtatccagcaggcacgctcgctgggtgactatctgcaagcggcgcctttcgaccgggtattgtgcagcgagctggcgagaacccagcacaccgccgacctgttgctcgctggccggcctgtcccccggcaaattattccttcattgaatgagatgttctttggcgattgggaaatgcgtcaccatcgcgatctgcaaaaagaagacccgcggaactacgctgcctggtgcaaagactggcaacacgccacgccgaccaatggcgaaagcttccaggcctttgcccagcgtatcgcggactttgccgccagcctcgggcaatatcaacagcgggctaacctgctgatcgtcggccatcagggcgctttaagcctgttaatcgcactcttattgcagatgccggcagcagcaatgtggcattttcccctcgcccacggtagctggagccttatcgaacgacgcgacgatttcacaaccttgcgcgtattaaatagccaggcgcagtggcgcgcggaataagaattcatggccgcccattgacagccccgagcaggctgctattctccgcagccaggctacacccgctatacgcatcttgcagaaattgttttacaaaaatggcgatgcattcgtcggcaagggatgggatgatagcccgctttcaagggctgaaagctgacttttctcccgacattgccatgacttcgggtatactgtcaggctcgttattgttatcactcttcacgcacccagggggaacacttgcagggtaaagcactccaggattttgttatcgacaaaattgatgacctgaaaggtcaggacatcgtcgccattgatgtacatggcaaatccagcatcaccgattgcatgattatttgcaccggcacctccacgcgccacgtaatgtccatcgccgaccatgtggtgcaggaatcccgcgccgccggtatgctgccgctgggcgttgaaggtgaagccgccgccgactggatcgtagtcgatctgggcgacgtgatggttcacgtcatgcaggaagagagccgtcgtctgtacgagctggaaaaactctggagttaatgcgtgaagctgcaattggtggccgttggcaccaaaatgccggactgggttcagaccggctttagcgaatatctgcgccgttttccaaaagatatgccgttcgaactggtagagatccctgccggtaagcgcggaaagaatgccgatatcaaacgtatcctcgaaaaagagggcgaaatgatgctggcagcggcaggcaagaaccgtatcgtgaccctggacatccccggcaaaccctgggatacgccacagctggcgcgagaactggaacgctggaagcaggatggccgggacgtcagtttactcattggcggcccggaaggtctctctccggcctgcaaagcggcagcggaacagagttggtcgctttccacgctcacgttgccccatccgctggtacgcgtgctggtggctgagagcctgtatcgtgcgtggagcataacgactaaccacccttaccaccgtgagtaatgatgacctgggtagactaagcagcgaatgaaattacagaattctttccgcgactatacggctgaatcctcgctgtttgtacgccgcgcgctggtcgcttttacgggcattttgttgcttaccggcgtgctgattgccaacctctacaacgtacagattgtccgtttcaacgactaccaaacgcgttccaacgaaaaccgcattaagctggtccctattccgcccagccgcggcattatttacgatcgtaacggcacgccgctggcgctgaaccgcaccatctatcagttggagatgatgccggaaaaagtcgataacgtgcagcagacgctggatgcgctgcgcgacgtcgtcgacctgaccgacgacgacatcgccggctttaaaaaagagcgcgcgcgctctcaccgtttcacctcgattccggtgaaggtcaatcttaatgaagtccaggtggcgcgtttcgccgtaaaccagtaccgctttcccggcgttgaagtcaaaggctacaagcgccgctactatccgtataactccgccctgacccacgttatcggctacgtctctaaaattaacgataaagacgtcgatcgcctggataaagagggcaaactggctaactacgcgtcgacccacgacatcggtaagctgggaatcgagcgctattatgaagacgtgctacacggacaaaccggctacgaagaggttgaagtcaacaaccgcggccgcgttattcgtcagctaaaagaagtgccgccgcaggccgggcgcgatatctacctaacccttgatttgaagctgcagcagtatatcgaaacgctgctggcgggcagccgcgcggcggtggtggtcaccgacccgcgcagcggcgcgattctggcgctggtttcaaccccgagctacgatcccaacctgtttgtcgatggtatctccagtaaagattattccggactactcaacgatccaaataccccgctggtcaaccgcgcgacgcagggggtctatccacccgcctcgacggtaaaaccctacgtcgcggtctcagccttgagcgccggcgtcattacccgcaacaccagtctgttcgaccccggctggtggcagttgcctggctcggaaaaacgctatcgcgactggaaaaagtggggtcatggtcatctgaacgtcaccaaggcgctggaagagtccgcggatacctatttctatcaggttgcctatgatatgggcatcgatcgcctttccgaatggatgagtaagtttggctacggcgattacactggcgttgacctggcggaagaacgctccggcaacatgccaactcgcgaatggaagcttaagcgctttaagaaaccctggtatcagggggataccatcccggtcggtatcggccagggctactggaccgccacgccgattcagatgaacaaagcgctgatgatcctgataaacgacggcgtggttaaagtgcctcaccttctgcaaagcaccctcgaagacgggaaacaggtaccgtgggttcagccgcatgaaccgccggtcggcgatattcattccggctattgggaaatcgctaaagatgggatgtatggcgttgccaaccgcggcaatggtaccgcgcacaaatactttgccagcgcgccgtataagattgcggcgaagtccggtaccgcgcaggtattcggcctgaaagccaacgaaacctataacgcgcaccgaatttccgaacgtctgcgtgaccacaaacttatgacggcgtttgcgccttacaacaacccccaggtcgcggtggcgatgatcctggagaatggcggcgccggcccggcggtcggtaccattatgcgccagatcctcgatcacatcatgctgggtgataacaacaccaatctgccgagtgaaagcccggcggtgacggcgggggaggatcaataatgaccgataatccgaacaaaaaatcactatgggataaaatccatctggaccccacgatgctgctcatcctgctggcgctgctcacctacagcgcgctggttatctggagcgccagtggccaggacgtgggcatgatggagcgtaaaatcggccaaatcgccatgggcgtggtgataatgatcgtgatggcgcagatcccgccgcgggtatatgagggctgggcgccctacctctatattttctgtattattttgctggttgccgtagacgccttcggcgcaatatccaaaggcgcacagcgctggttggatctcggtattgtacgctttcagccctcggagattgccaaaatagcggtaccgctgatggtggcgcggtttattaaccgcgatgtctgtccgccgtcattgaagaataccgccatcgcactggtcctgatcttcctgccgaccctgctggttgcggcgcagccagacctcggcacctcgattttgatcgccctctccggcctgtttgtcctgttcctctccggcctcagttggcgtttaatcggtatcgcggtagtgctggtcgccgcctttattccgattttatggttcttcctgatgcacgattaccagcgtcaacgcgtcatgatgctcctcgatccagagaccgatccgctgggcgcgggctatcatattattcagtcgaaaatcgctattggttccggcggcttacgcggtaaaggctggttgcatggtactcagtcgcagctcgaattcctgcctgagcgccatactgactttatcttcgccgtgctggcggaagagctgggtcttatcggggtgttgatcctgctggcattgtacattttgcttatcatgcgcggactgtggatcgccgcccaggcgcaaaccacctttggccgcgtcatggcaggcggtttaatgttgattttattcgtttatgtcttcgtaaatattggtatggtaagtggtattttgccggtggtgggggtacctttgccgctggtcagctacgggggctcagccctaatcgtattgatggccgggtttggtatcgtaatgtcgatccatacccacagaaaaatgttgtcgaaaagcgtttaaggggttcgcaatgcgtaagcaatggctggggatctgcatagcagcagggctgctggcggcatgttcgggtgaagacgttcagcagaagacggttagcgtcccgcagccggctgtctgtaatggtccgacggtagaaattagcggcgccgatccgcgtttcgaaacgctgaacgccacggccaatcaggattatgaacgcgatggcaaaagctacaaaatcgtccaggatccggctaacttcacccagaccggtctggcggcaatttatgacgccgagccaaacagcaacctgaccgcctctggcgaagcgttcgatccaacacagcttaccgccgcgcatccgaccttgcccatcccaagctatgcgcgtatcacgaacctggctaatggccgaatgatcgtggtgcgcattaacgatcgcggcccgtacggcaatgaccgggtcatttccctgtcccgcgcctccgccgaccgcctgaatacctcgaacaatactaaagttcgtatcgatcctatcatcgtctctcaggacggcgccttgtccggcccaggtatggcatgcaccaccgtcgccaaacagacctatgccctgccttcacgtcccaaccttgatggcgatggttctgccgccatcgccccggccgatcagtcaaacgttcacgccatcagcaactcaacgcttaagcctgaagataatgtgggcgcgccggttaacggcagtggattccttggcgcaccgacaccgctgaataatggcgtgctggaaagcagcgaacctgctgctgcgcctgccgccgtcgccgcgacgccggcaacacccagcgctccggtcaccgcgccgggctcgattcagggaagcgttgcgcctgccgcgaccgcagcagcagccgcgactgttgccgcaccagccgccagcaccagtggcgagttcgtcgtgcaggtgggcgccgttagcgaccaggctcgcgcccagcaatatcagcagcgcctgagccagcagttcgccgttcccggacgtgtgatgcaaaacggcgccgtatggcggatccaactggggccatttgccagtaagtcgcaagcgtcgacggtacaacagcgcctgcaaaacgaagcgcagctgcaatcatttattactcgcgccaactaaacgcaacgccgcggcatcccgtgctactgcatatgtaaaaatcattaacaaagtcatatgtaatgtcgggtgccgctgcgaaatgcatttgttatagtaaggcactttttttaatttcatcacggatgccgttgttctaaccatgaagacctctttcaccgctcgtttactcgttacggccctctccgttgcggcactgtctaccgctgcccgcgccgatgacctgaatatgaaaaccatgatcccaggcgctccgcagatcgatgccgaatcctgggttcttatcgattacaactcaggtaaagtactggcggaaaacaacgccgacgcccgtcgcgatccggcgagcctgaccaaaatgatgaccagctacgtcattggccaggccatgaaggcggggaaattcaaagaatccgatctggtcaccgtgggtaacgacgcgtgggcaaccggtaatccggtgtttaaaggttcttccctgatgttcctgaaaccgggcatgcaggtgccggtttctcagctgatccgcggcatcaacctgcaatccggtaacgatgcctgcgtggcgatggccgactacgtcgccggcagccaggacgcatttgtcagcctgatgaacaattacgttaacgcgttgggcctgaaaaacacccatttccagaccgttcacggcctggatgccgacggtcagtacagctccgcgcgtgacatggctctgatcggccaggcgctgatccgcgacgtaccgaatgagtactccatctaccgtgagaaagagttcacctttaacggtattcgccagctgaaccgtaacggcctgctgtgggataacagcctcaacgtcgacggtattaaaaccggccataccgataaagcaggttacaacctggtcgcttctgctaccgaaggccagatgcgcctgatctccgcggttatgggtggacgtacctataagggtcgtgaatccgagagcaagaaactgctgacctggggcttccgcttcttcgaaaccgtaaaccccattaaagcaggtaaagagttcgcctctgaaccggcctggttcggcgatagcgatcgcgcctctctgggcgtagataaggatgtctatctgactatcccacgcgggcgcatgaaagatctgaaagccagctatgtgttgaataacaccgagctgcacgcgccgctgcagaaaaaccaggtagtcggtaccatcaacttccagttagatggcaaaactatcgatcagcgtccgttagtggtgctgcaggaaattccggaaggtaatttcttcggcaaaatcattgattacattaagttaatgttccatcactggtttggttaaaaattgaacacttgaaagtgtgatttctatccccatatactattcatcaaagaaacctgataactcccacatcacgtgggagttattattttagtcgtcacaccggagctgacatgaaaaccaaacttaacgaactgcttgaattccctactccatttacttacaaagtaatggggcaggcgttgcctgagctggttgatcaggtggtggaagtggtacagcgccatgcgcctggtgattactctccgtcagtaaaaccgagcagcaaaggtaactaccactcggtctccatcaccattaacgctacccacattgagcaggtcgaagccctgtacgaagagctgggcaatatcgaaatcgtgcggatggtgctgtaatccctcgccttacccggcctcaagcgccgggtaatcctctttctttcgctgtgatatactctcccccacttaagtcatccctctcggcggagacgttgttttgcagcacaataccattcttattcgacaactcggcctgcaaccttacgaacccatctcgcaggcaatgcatgaatttaccgacagtcgtgacgacacgacgctggatgaaatctggctggtagaacatcacccggtctttactcagggtcaggccggtaaagccgaacacgtgctggtgccaggcgatatcccggttattcagagcgatcgcggcggtcaggtgacctatcacgggccaggccaacaggtgatgtatgtattgctgaatcttaaacggcgtaaactcggcgtacgtgaattagtgacgctactggagcagaccgtggtcaatactctcgcagagtatcagattgaatcccacccacgcgccgatgcgccgggggtttacgttggtgaacagaaaatctgttcactggggctgcgtattcgcaagggctgctcgttccacggactggcgctgaatgtggcaatggatttgacgccattcctgcgtattaatccgtgcggctatgccggcatggagatgacgcaaatgcgccactggcagccgcaggccactacggaaaacgtcgcgccgcggctggtcgccaacctgctggcgctgctgaataacccgccgcatgaatatgtcgccgcttgatgcgcaccgcgctctgaaccttcagagcgcaactcattattaatacttcaaatttgcaatcaattgtcactctacgccacataatcgcccgctataatgaggctatgacccaacgaccggatccgcgagtggccgacaatcatcctccattggaaagcaacgaacagccagaagatcggcagatctttcgtattctgcgtaatatcgatcttaacctgttaactatcttcgaagccgtgtacgtgcacaaaggcatcgtcaacgcggcgaaggtattaaatatcacaccttcggcgattagccagtccatcaataaactacgggctctattccccgacccgctctttattcgtaaaggtcagggagtcacgcccacggcttatgcgacccacctgcatcaatatatcagccaggggatggaagcctttctcaatgcgctggatttgggcagcggctcacatcagcagcgtgtgctcactattgccaccgcgccgaccgtcggcgctctggtgataccgaaaatcgccaatgcgttgaaatcgcgctttcctcaggtattactgcacaatatggcgattaccgatgccgccagccagcttaatcagcggcaggttgacttactgatcgacagctatccccatagcgggctggctattgcacaccaggtgctgttctccgaaccggttgtcatcttttgccgcgaaaatcaccccattttgcaccttcccctgacgaaggaaaatctgcagcagtatgagttcgcgctattgctaccggaagggcagcgctaccctaccctgcatcgccagctagaagagtacgtcggcgaacgccgctgcggctttagcagctataacctgttgacccaggcggcaatgatgaataatagcgatttgctggggctgacgccggagagtatgttcgcgctggtggcgaaaatctggcctttacaagcgatttcttttccacctctgcaggaccagcgtattgatatttcgctccattacaaccggcaaagcgcacaggagccgttactgaaagcgattatcgacaccattgtgcaaacttatgcctgctaaccgcacgcgagggaaaaggataaaacaacaactattttacaatttgccgggtaaccaggctgctttcaaccccgtatcaatgatatactgcctgtccttagttcaaaaatagttgataaatacaacatttgattgaattaattcgctttccttcgtgactcgcaactggaacacgcacgctatgagtaaacccattgtgatggaacgcggtgttaagtaccgcgacgccgataaaatggcccttatcccggtgaaaaacgtggcaactgagcgtgaagctctgctcagaaaaccggaatggatgaaaatcaaacttccggctgactcgtcccgtattcaggggatcaaggcagcgatgcgtaagaatggcctgcactccgtgtgcgaagaagcctcttgcccgaaccttgccgagtgcttcaaccacggtaccgcgacctttatgatcctcggcgctatctgtactcgccgttgtccgttctgcgacgttgcccacggtcgtccggtgacgcctgatgccaatgagccgcaaaaactggcgcaaaccatcgccgatatgggtctgcgctacgtggtggtgacttccgttgaccgcgacgatcttcgtgatggcggcgcgcaacacttcgctgactgtatcagcgctatccgcgagaagagcccaaatatcaagattgaaacgctggtgccggatttccgtggccgtatggatcgcgcgctggatatcctgaaagtgacgccgccggatgtgtttaaccacaacctggaaaacgtaccgcgtctgtatcgccaggtgcgtccgggcgcagattacaactggtcgctgaagctgctggagcgctttaaagaagcgcatccggaaatcccgaccaaatcgggtctgatggtcggtcttggcgaaaccaatgaagagatcatcgaagtgatgcgcgatctgcgccgtcatggcgtcaccatgctgacgctgggtcaatatctgcagccaagccgtcaccaccttccggtacagcgttatgttagcccggaagagtttgaagagatgaaagctgaagccatggcgatgggctttacccatgctgcctgcggcccgttcgtccgctcttcctatcatgccgatctgcaggcaaaaggtatggaagtaaaataactcctgtctttctctggccgtcgttcgcggcggcctgatttaccggctaatccccctttccattgtcatacctggttgcatcttttttcatatccaaaacgctaaccataaaaaaggcgacaacgaatacgctgccgcctctttgccgcctgagcttcacacccggccgcgacgcgcccccgttcgtcgggagcccgtgattaattactctttatgagagagcttctgtgccggcgcgtcttcctcagcgctggtctttttggcactatcatcgtcatcattcatggctttcttgaagcctttgatagccgaacccaggtctccacccagcgtgcgtaattttttggtaccaaacactaaaataatcagcgctgcgactaccagcagtttggtaatactaatctcacccatagctaaccttcttctctatacaagctcaagctgcgaatacgccatcatacacatatacgcatacaattaacggctatttgacgcgccgacacaatagcaatctgtaacaaggtgaatcaagccttgtttaaaaaaacgtcacaataattgcggtggcgcaaatctgcgattacgcagcaccggcaaactctcacgcacctgacgaatataatctgcggatatctcagcaaaaatcagctgcggctgggcagcagcgccagcaatggtggtaccgagcggatcgataatccggctctgaccgatattacgcgttccacattcgcctgccgcaataatgtagcaggtggtatccagcgctcttgccgccagcagcgttgcccagtgatgttctttcaatggcccgcgaacccacgcggtaggaagcaccaacacatcggccccctttaacgctaacgatagcgctaattcgggaaagcgtaaatcgtagcaggtcattaagccgattcgcatcccatttacatcaattaacggcggaatttgttcgccggcatccaccagccgcgactcctgcatattaaacgcatcgtacaaatggagtttctggtattgtgcgctaatcatcccctgtcgtattgcgaccagggtattgctcgcgcgcccttcgccagagggcacgtgcagcgttaatattgtggttaagtcattactccggctttcggccagcagttgctgcatgaagccgccgtccagcgcctgcgctgattttaccgacatatcaggatcgttatcggcccgcgccagcaacgcctcgggtaagaccagtaacgataccccgcattctgccgcctgacgcatcagttcaacgcagatctgcgcattagtttgccactgcgccgtgacggcaaattgccctgctgctacccgcatctctttctcccacttcgaatccatagccaaaaacgcctttggcgcgctacactcggccttatacctaaccaaatagcaggaaatgaccgtgttacaactccttttagccgtttttgttggcggcggaaccggcagcgtgttgcgctggtggctgggcatgaaatttaaccccatgcatcatgcgattcccattggcacgctaatcgctaacctgctgggcgcatttattatcggcgccgggctggcgtggttcaatcgtctaacgcatgtcgatccgatgtggaaactgcttatcactaccggtttctgcggcggcctgacgactttctccaccttttcagcagaagtggtcttcctgctccagcaggggcgtttcagttgggcattgttaaacgtgctggtcaatctactgggttctttcgccatgaccgcgacggcattctggctgttctcacagtcagccgcccgctaacgacaggcaaaaaaaaacccgctataagcgggtttttatattctactgacgcgttggttagatagccattacgtttgcagcagaagggcctttggcaccgttagtgatttcgaactctacgcgctgaccttcagccagagttttgaaaccgttggactggattgcagagaagtgtacgaatacatctttgctgccatcttccggagtaatgaaaccgaatcctttggactcattaaaccacttaacgttacctttaatcttagacatcaaaattacctttaaattaaaaaacgacactaatgctgtgtcggataccagtacatcaattgtgatgccttttgtccagcgtaactttcttaaaaagtgataaaagtctctatctttatagccgacagttacgttagtcattgtttttcaacaagacaaagaacttatcacttttgtcactacgttataacgattaaaactgaatgcgtgcccaggcaaaataaacgttgccgttgttataagtgccggggatgtaggtcatctggaacgtcgccgggccgtagccaatcgatgccagcggcagcaccaccgggatcgggatatagttccagttgtcgcgcgccgttacgccaagggtgtaaccaaggccaagatggaagttgtcgtcggccagcgggcgccaggttttttcccagccatagccgccaatcggctcccacttattaaaggaatctttaaacgccatcagataaaggccgtgccagttacctttctcgtcccaacgtgacatgccaaatcccgcgccccatgggcgttcgttatacttatcggttttctctttgtcataggcaaagcgcgcgtgccaggtgatcgccgggatgtagagatcgtagtgctcaggctcgttccaggtttgcgcgacattgtccgtcagcgtattgtagccatcgcggagcgttgacgagaacgaggcgttagcatagccgggcgacagcagcaggccggacagcgcaagcataaataatgtaaattgacgtagtttaaacacttctctattaccgattgcaattttaaaaacgaagtaaagtaacaaatgtaatcttaatagactgttaacggaataaggcaaaatcctgaattgcgccatagcaaaaagctcatgctggtagacaacttttgtgatgttagccgtgccacgggttctgattagtcaattctcagtagtttattgatttgggtcagcaagttctgtccgttttttgggcacattccatcacttaatttttgtagtgctttagatatcagcagattctttgggttaatggcttaggggtaaagtatgcttacgcttgttgagatccttatcggggtcgtggttattgtgggcgtcgcccgctacattataaaaggttattccgcgacaggggtgctgtttgtcggcggtttaatcttgcttatcgccagcgccattatgggacataaagttctcccggccagcgccgccactacgggttacaccgcaaccgacatctttgaatatattaaaatactgctcatgagccgcggcggcgacctcggcatgatgattatgatgctctgcggtttcgccacctatatgacccatatcggcgccaacgatatggtggttaaactggcctctaagccgctgcaatatattaactcgccttatctgttgatgattgccgcctacttcctcgcctgcctgatgtcgctggcggtctcctcggcaactggccttggggtgctgctgatggcgacgctgtttccggtaatggtcaatgtcggcatcagccgcggcgccgcggcggcgatttgcgcctcccctgccgcgttgatcctgtcaccaacctccggtgacgtagtgctggcggccaaagctgccgaaatgccgctgattgatttcgctttcaaaaccactttacctatctcgattgccgctatcgtctgtatggccatcgctcacttcttctggcagcgctacctcgataaaaaagagaacgcctcgcacgagatgctcgacgtcaatgagataaccaccaccgccccggcgctgtacgccattctgcctttcacaccgattatcggcgtgctgatttttgacggcaaatgggggccggagttacacatcatcacgattctggtgatctgtatggtgctggcttcagtactggaattcctgcgcagttttgacactaaaaaggtcttcaccgggctggaagccgcctatcgcggcatggcggacgccttcgccagcgtcgtcatgctgttggtcgcggcgggcgtatttgcccagggtctgagcactatcggttttatcgacggtcttatctctattgcgacctcgttcggatccgccagcatcatcctgatgttggtattagtcgtcctgaccatgctggcggcgatgaccaccggttccggcaacgcgccgttttacgccttcgttgagatgatcccgaagcttgcccactcttccggcatcaacccggcctatctgtcgatccctatgttgcaggcatcgaatctgggacgcaccatttcaccggtttccggcgtggtggtggcggtggcgggaatggcgaagatttctccgttcgaagttgttaaacgcacctcggttcccgttatcgtcggcctgttagtggtgatcatcgccaccgagattctggtccccggcgccgcgattcaataaaccacaaaccgcagtgaaaaggcgccagcaggcgccttttttatgctttaataaatcccagcaattaatcatctcccactatcaggaataaaaatgttcaggaaggatgtcgtcgccattgcccttttactcggcgcaacacaggttggcgcagaaccgcttaccgcgacgaaatacggtgatttcgatcgttacgtgctggcattgtcctggcaaaccggtttttgtcagagcatgctggatagaaatcgtaatgaaccagaggagtgccggctacagcaggaagaacgcaacaaagccgattttctgacggtacacggcctgtggccgggcctgccgaagtcgatcgcctcgcgcggcgtcgatgagcgccgctggatgcgctacggctgcgcgacgcgccctatccccaatatgccggaagtcagagccgggcgtaaatgccaggccgcggaaaccgggctatcgctggaaatggccaataagctgaatagcgtgatgccgggttccggcggtaactcctgcctggaacgctatgagtatgccaaacatggcgtctgtttcggcttcgatccggatagctacttcggcacgatggtgcgcctgaatggcgaagtgaagcaaagcgcaatcggcgattttctggcgaaacattacggacaaaccgttagccgtagcgattttgatgccgccgtcgccaaagcctatggcgcgcaaaacgtgaaagcctttaaattaacctgtgatggcaatcccgcttatttaacggaaatgcaaatctccatcaaagctagcgcgatcaatgctccgctgggcgcagattcgttcctgccgcagccgcatccgggcaactgcgctaagcagtttgtgctggacaaagtcggttcttgataacagagcgatgcgcccatttcatctgcttttgctaacgatgcgctgaatgtgcgcttaatcacttcaaacatcaggcaagtctcagtatgatgaagggacattaacccttgcccctttcggcgagggttttcttttacggaaaaggttcctggataacatggagtatgcaatgaccagacccgcaatcattattaatgaattcgatgctgaacgtatcgacagactgcttgaacagccggcgtatgctaattcaccggtagccgatgccctgaacgacgaactggaccgcgcgcaaatgctggcgccggaagcaatgccgcacgacgtcgtcagcatgaacagcaaagtccgcttccgcgacttaaccagcggtgaagaacgggtgcggaccctggttttcccggcgcaggcgaccgatagcgccactcagctttcggttctggcgccggttggcgcggcgctgctcgggctgaaagtcgggacctccattcattgggagttacccggcggcgcatcggcgcatctggaagtgctggaattgctgtaccagccggaagccgcaggtgaattccaccgctaaataccccgctgcctgaggcgtttcacgctttattcagaggatgcctcgtcatcctctttctgtttcccttcctctctgacaaatttttacctcatcccgtgacggcgtatacagttttgcgacctgaacgccacaatatccttgtataatatgttgatatagaaacagacaaacaaggagaaatgcatatgtataaaactatcattatgccggttgatgtctttgaaatggagctgagcgacaaggctgtccgccatgcagagtttctcgcccaacaggacggtattattcatttacttcacgtcttacccggttcatccagcttcaccatgagccgttttaccgccgatctgcgccgctttgaagagcatttacagcatgaagcggaaactcgcttacagaccatggtcggccactttagcattgacccttcacgtattaagagccatgtgcgtttcggcaacgtccgcgatatggttaatgagctggccaatgaaatcaaagctgacgtggtagtcatcggttcacgtaatccgtcgatcagcacccatttactgggttcaaacgcctcaagcgtgattcgtcatgcccatattccggtaatggtcgtgagataacggaacggtgcaataagcaaaaaaaagaggcgaccctggggtcgcctctttgctgtgtgcaggtgttgtcttacgactttttatgcgcttttggtacgaatcagataatcgaatgagctcagagaagccttcgcaccttcgccagtggcgataataatttgtttgtacggcacggtagtgcagtcgccggcggcaaatacgcccttcacgttggtttcacatttggcatcaatgatgatttcacccatgcggttacgctcaaccgtaccttccagccagttggtattcggcaacaggccgatctggacaaaaataccggctaacgcgacatgatgctcatcgccgctgacgcggtcgcggtactgcagccccgtcaccttactaccgtcgccaaccacttcggtggtctgggcgttgagaataatatcgacatttttcaggctgcgtactttatcctgcagcacctggtcggctttcatttctggcgcgaactccagcaacgtcacgtgttcaacgacgcccgccaaatcaattgccgcttcaacgccagagttaccgccgccaatcaccgccacacgtttccctttaaacaacgggccgtcgcagtgcgggcagtaggttacgcccttagtgcggtattggtcttcaccaggcacgttcatgttacgccatttggcgccggttgcgatgataacgctgcgcgctttcagcaccgcgccggaggcggtttcgatctgatgcaggccaccttcgacggctgccgggatcagttttgccgcgctttgtgaatcaatcacatcaacatcatattcactgacgtgcgctttcagggcgccggccagtttttggccttcggttttcggtacggaaatatagttttcgatatctacagtatccagcacctggccgccgaaacgttcgcccatcaggccggtacgaatgcctttacgcgcggagtataccgccgccgctgcgccagacgggccggaaccgacgattagaacatcataagcatcgcgtttgttcagctcttccgccgcgcgtttttccgcgccggtatccactttggcgacgatttcagtcagcgtcatacgaccttgaccaaactcctgaccattcacaaacaccgccggtacgcccatcacgttgcgatcggtgatttcattctggaaggttccaccatcaatcgccgtgtgtttgatgcgcggattcagcaccgccatcaggttcagcgcctgcaccacgtccgggcagttgtggcaagagagcgagtagtaagtctcgaattcaaaatcaccgtcaaggttgcggatctgctccagcagcgactgcgcttctttcgacggatgaccgccggtccacagtagcgccagcactaatgaggtgaactcatgtcccaggggagaaccagcaaaacgcggcccctggttggaacctgggttagtaatcaggaacgatggcttacgtaccgccagcgtgttgtcttctttaaaggtaactttgtctgacagttcagcgatttcagccaacagttccttgatctctgccgatttagcgctgtcatccagcgtggcaatcagctcaacaggtttggtcagcttctcaagataggccttgagctgggttttcatgttggtgtcgagcatttttatctcctgggcttaaaacatcatcatgcaagcggcctttgtcaggcagcctgaatgcgcttgcatcatggtgtggaataaaacgggcgctggtgcgcccgttgattagcgggaataaaacgaattagatcttaccaaccagatctaaagaaggagccagtgtcgcttcgccttctttccacttagccgggcacacttcgcctgggtgggaagcaacgtactgagcggctttgattttacgcagcaggtcagacgcatcacggccgataccttcagcggtaacttcgattgcctggatgataccctgcgggtcaacgacgaaggtcgcgcggtcagccagaccttcatcttcacgcatattgtcgaagttacgggtcagggcgccagtcgggtcgccgatcatcgcgtatttgattttagcgatggtgtcagagctgctgtgccacgctttgtgggtaaagtgggtgtcggtagaaacagagtaaacgtctacgcccagtttctgcagctcttcgtaatggtcagccacgtcacccagttcggtcgggcaaacgaaagtgaagtcggccgggtagaagaagaagacgctccagcggccttcagtgtctttttcggtaacttcgatgaattcaccgtttttgaatgcctggtttttgaaaggtttgattttggtattaattaaagacatcgatacttcctccgtgtttttgttgaggtctaagttaacgaatttttcctgactcgaccaatgcgtttgcattatcaaatcaataagcgttatctaacaaccgtaacaagacaactttgtgaacctgccgtcgcgatcgcggtttttccccgtgtttcgcctcatttcgctgaaagtaaaaaggccgccctctcaggcggccccgttacctgaaatacccgcaggtagcttcagcgccagaatggctggcaatatgttgcgctctacaccttaatgtaacagcatgaaggattacatcattcgccgaactaaagggcaaccaaacgcccggcaggtgttatctatggctgcgataggtttcgccaccacttcacattagcttctgatttaaaaggaatactcatgttaaaacgactgctttttctgagcctgctgccgttgtgtagctatgccgaagacctccccgcccccgtaaaagcaatagaaaaacagggtattactatcattaagccctttgaagcccccggcggcgtcaaaggctggctcggaaagtatcaggatatgggcgttgctatttatctcacccccgacggtaagcacgccatttccggctacatgtacgacgaaaaaggcaacaatctgagcgaacagcttttccagaaagaactctataccccggccggacaggcgatgtggaaaaaactcgagtccgctgactggctacgggaaggtaaaaaagaggcgcccatcgtcctttatgtgtttgccgaccctttctgcccctactgtaaacagttctggcaacaggcgaggccgtgggttgaatccggtaaagtgcaactgcgcacactattggtcggcgtgattaaaccagaaagtccggccaccgcagcggccatactggcaagcaaagacccggcgcaaacctggcatgattacgaacagtccaacggcaaactgaagctgaacgtaccgacagatatccctgcggccttgatgaggaccctgaatatcaaccagcagctgatggatgaccttggcgccaacgccacgccggctatttactatatgaataaagataacgtgctgcagcaggtagtgggactacccgataaagagaaactgcaggtgatgatgggtgaaaagcagcagtaaaaaataacgcatttccgccagatacttaaggacaaaaaaggatctggcggaaagcgattggttggtatacatttagtagggattaattgtatatttagctataataatgatatttgatagcatcgccacaaatgtataacggtaagaaataataatccgttcgcctcgctgcaacataaacaggacgttaagcatggccaacctttatgatttaaaaaaattcgatctaaacctgttggttatcttcgagtgcatttatcaacatcttagtatcagtaaagcggcggaaacgctgtttattactccttccgcggtaagccagtcactgcagcggttacgtaatcaattaaacgatccgctatttgtgcgttccggtaaaggaattaccccgacgatcgtgggcatgaacttacatcatcacctggaaaaaaacctcaaccaattagaaaaaacaattaatatcgccaatcattctgaattaagtaaacgatttgtaatttacagcccgcaacttcttatatcaccagcaaccatggatttaattaataaattgcacatggacccgaatctacaaatcgatcatcgcgatctgctgctatccccagaaagcgttgaagacctgatggcttaccgtaaagccgacctgatttatagtattacgcctctttctaatcacagtactatttgccagccttttcaggaattagaaattgcactggtttgtcgcgaaggccaccctcgtgcagatcatctgaattcatttgaagaggtgtctcgggaaggatttacgctttacacctcatctgacccgaatgtaaaggcctttcaacagcacgggagcgatctcatgcctgaaagaagaattgcgtttcgcagcaactcgctaatagctattttaacgatgatcaatcagagcgatcttattggttttgtcccgaagcacgcattaagttattttagcgcttcatttaaattccgcgaaatcattttgcctgacccgatccctccggtaatggcctatatgatttataatcgttcatcattaaacaaccccaaattttccgaatttattacgcaaaataccgcagtcaactaatttgccattacaaacatattcacatggtgaatatgtttgtgtgaattacattgaacccacttaaaacattaccatttcatattaaccttaccattaatgtgttctacactaccgtgaaagcgcatccatcacattaaaggattaatggtaatgtctttggtaaaaattccattacccgagtccgttcttcaggctagccagcagcggatacagtgggtattagaaaatttttcacgcatctgcatctctttctccggcggaaaagactccaccaccatgctgcacctggcggcgctttgcgcccggcaaatgggaaaaaaattcaacgtgttgtttattgattgggaggcgcaattttcctgcaccattcagcattgcgaaaatatccgtaccgaataccaggatgttattgagaaattttattgggtcgccctaccgctcaccacgcaaaattcactgactcagttttcgccggagtggcaatgctgggagccgggcgtcaactgggtacgccagccgcccgctgacgccattaccgatcccggctatttcccgttttatagcagcggaatgagcttcgaagagttcgtccgtgatttcgccgactggttttcacaaaaccgtccggcggcgatgatggtgggtatccgggcagatgaatcgcttaatcggtttatgaccatctcctcgcagcgcaaactgcgctttgccgatgataagccatggacgacatcggcaccgggcggccatacctggtacatctacccgatttatgactggaaaaccgccgatatctggacgtggtttagcaaaagcggtcatacctataaccccctttacgatctgatgtatcaggccggggtgccgctgcgctatatgcgcatctgcgaaccctttggcccggagcagcgccagggtctctggctgtatcacgtgctggagccagaacgttgggcagccatttgccagcgcgtaaacggcgtgcacagcggtggtatttacgcagggtacgacaacaaattttatggccaccgcaaactcgataaacccgggcaccacagctggaagagttacgccctgttcctgctggatagcatgccgcggccaaccgccgagcattatcgtaataaaatcgcggtctatctgcattggtatcaaaaacagggaatggaggatatccccgatagccaggagagcgacatcggcacccgggatatcccttcatggcggcgcgtctgcaaagtgttattaaacaatgattactggtgtcgccagctctcatttagcccaactaaagccacccgctataaaagctactgcaagcgcataagtaaaaaacgccaacaatggggactgctatgcaacaacgactaattacccaaatagaagagtatctggcagcgctgccggaagaggaaaaaatcgacgcgctgaatcactttcgccaggctctgcaccgccatagcccctttcacaaccagccggttgactgcgtgctatgggttaaagaggaagaggtggttcccaacgattacaaccctaataaccttgcgccgccggaaaagcggctgttattaacttcgctggaggccaatggtttcacgcaaccgatcgtggtgcagaatcaacagtcaaaacgctataccatcgttgacggttttcaccgccacgaactggcgggcagcaagctgtcgctgaaaaaacagctcaagggatatttgccggtaacctgtctgtcggcgaacagccccccgcgcgatgccctgatagccgcgactatccgccacaaccgggcgcgcgggcgccatcagatccacgcgatgtcggaaattgtccgcgagctggccaatctcggctggagcaatagcaaaatcagcaaagagctggggatggatgccgatgaagtgctgcgcctgaagcaaattaacggtctggccgagatgttcgccgaccgtcaattttctcaggcatggacggtgaaatagctacaggcgacgcagccgctctgctgccgccagcagggtctccggctgcttggcgaagcacaggcgaatcagcttatgcgggaacggatcggcacagaataccgacagcgggatcgccgccacgccgacttcagtggtcagccagcgacaaaagctgacgtcatcaaggtcagagatcgcgctatagtcggccagcaagaagtaggtcccttcacaaggcaaaatctccagccggctatcgcgtagcgcatcgataaacagatcccgacgctgccgataaaacgcagacagctcgcggtagtgctccggctgcgcacgcagcatatccgccagcgccaactgagcgggcgtattgacggcaaacgtcaaatactggtgcaccttacgcagttcggcgctgatggcggcaggcgccacgcagtaacccactttccagccggtcatgtgaaaagttttaccgaaagaagagaccgcgaccgcccgctcgcgcagctgcggatgggccagcacgctggcatgcccctgctctgcaaaacagatatgttcatacacttcgtcgctgataacgtagatttcccgttcagcgatcgcctgccacaacgcggcaaaatcttcccgctgccagacggtggctgatggattatgcggcgtattaagaatcaccaaacgggtgcggtcgcttaacgtggcggcaaactgctgccagtcaacgcggaaatgcggcggctgcagagcaatacgtttcagcaccccgccggaaagttctaccgccggcgcgtagctgtcatagctcgggtcaaagcagatcacctcatcgccggctctgaccagcgcggtgatcgccgcatacagcgcttcggtcgcccccgcggtgacggtaacatcgctattcgcatccgggcgatagccatacagctcagcggttttatcggcaatggcttcgcgcagcgccggtacgccggtcatcggagcgtactggttagccccctgggcgacgtgccaggccaaccgttcctgtaggtaacgcgggccatcaaaatccggaaaaccttgtgatagattgatggcctgatgctgcagcgccagcgcgctcatctgggtaaatatggtggtgcctaatgcagggagtttactctcaggaatcagtggcttatagctcattctctttgttccgattgtaatgctgttgttgaagccactataacacgatgttaatatttggcaatcaagacgcttagacgtctaaatgctaacgttatttcgcttgccgcaggcaggcggcaaaccgacgccaccggcagcacggcgcactatccactctggagataccatgatccgcgctatcgtgaccgatattgaaggcaccaccagcgacattcgctttgtccataacatcttattcccctacgcccgcgagcggctggccgcttttgtcagcgcgcagcagtatgtcgagccggtcagtaccattctcgacaatctgcgtacagaaatcgccgctcccgaagccagcgccgcagcgcttatcgacacgctattccgcttcatggacgaagatcgtaaatccacggcgctgaaagcgctgcagggcattatctggcgcgagggctatctgaacggcgactttaccggccatctttatcccgatgtactcccggcgctggagaagtggaaggcgatgggcattgatttatatgtatattcctcaggctcggtcgccgcgcagaaattgttatttggctacagcgacgaaggtgatattactcatctcttcagcggctatttcgataccctggtcggcgccaaacgcgaagttcaatcctatcgcactatcgccgaacaactggggcatagcccggcgagcattctgttcctctctgatatccatcaggaactggacgccgccgaagcggcaggtttacgcaccctgcagctggtacgcggcgaccgcgacccggccagccatcatccacaggttcagcgttttgacgacatcgacccggagcaacttcccgcatgagcgaattaactattttttccgttaacgacgccagccatccacgctggcacagcagcaacgccgatgagatccagcagcaattgcgcgcaaaaggggtgcgtttcgagcgctggcaggccgaccgctacctgggcccggcgccaaccgctgaaaccgttattgcggcctatcagcacgcgattgataaactggtggctgaaaagggctaccagagctgggatgtcattagcctgcgggcggataatccgcagaaagaggcgctgcgggctaaattcctcaatgagcatacccatggcgaagatgaagtgcgcttctttgtcgaaggcgccgggctgttttgcctgcatatcggcgatgaagtctttcaggtgctgtgcgaaaagaacgatctgatctccgtcccggcgcatacgccgcactggttcgatatgggttcggagccgaatttcaccgccattcgtatttttgacaatccggaaggctggatagcgcagttcaccggcgatgctatcgccgatgcctatccgcgcttaccctaacctttatgcatagcggcggcgcagcagctcgcattcgaagagaaattcgagcccttccagctgacgccgcgcctcgctaacatccctgccccagcaggttaagccgtggccgcggatcaaaaatccataacgcaaaggatggctacgggcatacgcttcaacccgcgccgccagcgcctcaatatcctgatcgttatcaaaaatcgccaccggtacgctatcgagatggctatgctgcccgctcagcgttttttgcatttcatagccctgcagctgcagggtatcgctggtttcaagacgtgagagcaccgtagcgtgcacggtatgcacgtgcagcacgacgttcgcttcaggaaacaggcgataaaccagcgtatgcaagccggtctccgccgacggtttacggcccgacggcgcgcgattgctggcgatgtctacctgtaaaaaatcgtcgctggtcaggctgcccttatcgcgccccgattcgctcaaccaacaccagcgcgcatcctcgcgtactgacatattgccgccggttgccggcgcccacccttttgcgccaatccagtgacaggtggtcaccagttgtgcgagtcgctcttgccacataatcgttccttatcactgttaaccgttacgccagcggcgcaaaaataccgtccgccacctgctgtggcgtgaccacgccgctatccagcacccaaccgctgattaacgcagctggcgtcacgtcaaaggccgggttataaaccggcgcgttttctggcgcccactgcacggcaccaaagctgccttttacgccggtcacctcttgcgccgcacgctgttcaatcgggatcgccgcgccgttcgggcagtagcgatcgagagtggtttgcggcgccgccacgtagaaaggaatacgatgatagtgagccagcaccgccagcgaataggtcccaattttattcgccacgtcgccgttggcggcgatacgatccgcgccgacccataccgcatcaacctgcccctgcgccattaggctggcggccattgagtcggtaataagctgatacggcacgcccagctcccccaattcccaggcggtcaggcgcccgccctgcagcagcggccgcgtctcatcgacccagacgttagccaccttgccctgttcataggccaaagcgataacccccagcgcggtgccgacccccgccgtcgccaggccaccggtattacagtgggtcaacaaacggctacccggcgttaccagcgcattgccagcttcggcaatgctggcgcacagctgtttatcttccgcaatcaggcgcagcgcttcgctctccagcgcctgcggatagtcttcctgcgccagcgcctgcttcatacgatcgagattattcattaaattgaccgccgtcggccgcgccgcgcgcagggtttccagcgcctgagtgagctcgtcgcgggataagccgcgctgcgccaacagcgccagcagcagactggcggagagaccaatcaacggcgcgccgcgcacccgcaaagcatgaatatggtccaccagcagcgcaacgttatccgccgccagccagcgtttttcctgcggcaatgcctgttgatcgagaataaaaagctgattttcgcttacccgcaggctggtggtctgtagtgtctgcatatcgttaaatccctgttgcgttgttgtatcacattgtgtcaggatgaaatccagatgtatagacgtctgaacggcttaattcagcacttttgaggatcgaggcaatgtcgcaataccataccttcacggccagcgatgcggtggcttacgcacaacaatttggcgggctcgacgatccgtctgagctggtgtcggcgcaggaggtaggcgacggcaatctcaatctggtgttcaaaattttcgatgctcagggcgtgagccggattattgttaagcaggcgctgccctacgtgcgctgcgtcggcgaatcctggccgctgaccctcgaccgcgcgcgcctcgaagcacagaccctggtcgcccactatcagcacagcccgcagcatacggtacacattattcatttcgatcccgctctggcggtgatggtgatggaggacctttccgatcaccgtatctggcgcggcgagcttatcggcaacgtctactatccgcaggcagcaggccagttgggcgaatatctggcgcagacgctgttccacaccagcgatttctatctccatccgcatgagaaaaaagcgcaggtggcgcaatttatcaatccggaaatgtgcgagatcaccgaggatctgttttttaacgatccgtatcagatccacgagcgcaataactacccggcggagctggaagaagaggttgccgccctgcgtgaggacgctcagcttaaactggcggtcgcggcgctgaagcaccgctttttctcacaggccgaagccctgctgcacggcgatattcatagcggctccatcttcgtcgctgaaaatagccttaaagccatcgatgccgaatttggctatttcggccctatcggttttgacgtcggcaccgccattggcaatttgttgcttaactattgcggtctacctggccatctcggcattcgcgatgccgcagccgcgcgcgagcagcggctcaacgatatacagaccttgtggcacaccttcagcgagcgtttccaggcgttagcggcggagaaaacccgcgatgcggcgctggcctgccccggttacgcctcagtattcctcaaaaaagtatggcgcgatgccattggattctgcggaactgaactgatacgccgcagcgtcgggctttcacacgtcgccgatatcgatgcgattcaggacacggccatgcgccacgaatgcctgcgccatgcaattacgctcggcaaagcgctgatcgtcatcgccgagcgtatcgatagcgtggacgaacttatcgcccgcgtacgtcagtacagctaaccgcgtgattatttatgttgggcttccagggtggcaaaccacggggcaataaagtcttcggtctgcccccagccagggatgattttccccagcgacgccacgttgaccgcccccggctgtgccgccagcagcgcctgcggaatcgccgccgctttgaaatcgtaggtagccggggtgctttccccggcaatcttattggcaatcaagcgtacgttggtggcgccaatgagtttcggatcgaccgccacgctaaccttccacgggctaccggcctcccgcatcagctgtaaatcctgattggaaatatcgatgctgtagagtttgatttcgctgcgcccgttttctttcagcgccttataggctccctggctaaaggcatcccacgtcccccagatggcgtcaattttacctttaggatacttagccaaaattgcgccgaccttgttagcggtgtcaccctgcacgtcggatgaaacggcgccgatagactccagctctttaatccccggattttgtttaagcagcgtctggtaggctgcctggcggcgctccattggcgggaagcctgccacccatagcttgataatattggccttgccgttgaagtcttttaccagttggccaaaagagagctcggtcaacgaggcgtcatcctgctggctaaccgtcacgccggggacggctccctgcaccgcggtatcgaacaccgccactttgatcccggcatcgaccgcttttttcaccagcgcggtcgagtagggatcgcgcccctgggaaagaataataccgtcgtatttctggctaatggcctgattgacgaaatcctggaacttcgcgtcatcaccgttgctcaggaaagcgctgactttaaaaccgagctttttaccttcctgaatcgccccggcgacaaactgggtagtgttatcgtcagaaccgagattgcgaatcaccgcgatgcggatcgggccgttatgctcagctatcgccgccggaaccggcgttggggtctgcgccagcgctgccatcgactgcagcaggcccagcgccataagagaaagtgctatctttttcattttgtttaccctgtaaagtgttaggtacggcgctgaaaataggtcagtgccagcgcgccagccagcaccagtcctttaataatgtccatcgcgtaatagggcactgacagcatcaccaggccattggaaagcacgccgaggatcaccgctcccaccagcgtccccagcgcattcggcttgccggagcccgccagcgaaaagccgatccacgccgccgcgaccgcgtccatcaggtaaccgccgccggcgttcacctgggaagaaccaatccttgatgccagcagaatgccgcccagcccggccagcagcgaggcaatcacgtaggccgccactttatagcgcgtgatccgcaggccggagagccgcgccgcctccggattaccgccgatggcgtacatccgccgcccgtgggtggtgaacgacagcgccagctgtgcgatcagcgttaccaccagcatgataatgacgatggtcggcacctgccccagcgcgccaaacgccgccggaatcgtgccttcagccatatcgccgctcggcaacaccatattttcggtgatcgaaccgccgtagctgtaggtcatcgccacgccctgaatcacaaacaggctggcaagcgtggcgagcatgtcaggaatgcgcagcaccacgatcagaaacgcgttgaataaccccaccagcgtacagagcgcgagggtaatcagaatggcttcagtggtgttcaggccgtgccagacaaacaacgaaatcactaacgcattcgccagcgacgccgtcgaccccaccgacagatcaaagccgccgatggtgagcgaaatcgacaccccgatggcaatcaccgtcacgatagcgatggagcgcagaatgttgatgatgttaaagggatcaagaaagttatctgaggctaaaccaaagacgccaaccagcagcaccacggtcagcaacataccccatttatagagaaaatcgaaaaaccgctgacggcccgataccgtcgcgttgactgccagggccttgctcacgctgccgctcctccggtggagtaataaagaatcgtctcttcccgcgcctcggcgccgggtatttccgccacaatgcgcccatcccacaacacgcagatgcgatcgcacaggcccaccagctcggaaaattcgccggaggcgtaaatcacgccccggccctcccgcgccaggccatcaatcaactgaaacagatcggttttcgctttcacgtccacccctttcgtcggctcgtcgaaaatcagcacgtttgcgctgccgcgcagccatttgccgatggccactttttgctgattaccgccggagagacggcgcagtgactgccccggtccggtggcacgcacgccgatacgggcaattacctcctgcgcccaccgccacgcctgccgatggccgaacaggctccagcgcgaaaagctgttatcggcgctgaccgccagattcatggcgatcgcctcatcaatgaatatcccctctttgcgccgctcttccggcaccagcgccagcccctggaggacggaatcggccggatcgcgcggccgccacggctggccgttaagttcgccgtagcgcagtcggcttttgctggcgccgaataaggctttgcagagttcagttttccccgcgcccgccaagccggcgataccgagaatttcccccttatgcaggcgtagcgagatatcctgcaacagcgcttcatcatgcaaaccctcaacctgcaacagcacctcttcgccatgcggcggacgcgcaggcgggaaaatatcgctcaactcgtggccaagcattttttcgacgatctgctcgccgctgagctcggccatcggcccgctttcgattaaacggccatcgcgcagcaccgtcagggtgtcgcaaatcgctttcagctcatggatacgatgcgaaataaagaccacgccgatcccctgctgctgcagacgacgaaccaccgcaaataagcgttcgctttcgtgctgatccaacggcgcggtgggttcatcaagaatcaaaaaacggcagtggtgcgacagcgcgcgagccagcagaatttgctgcttttcagcaagggtacagctatcgattgaacgtcgaacgtccagcgcaatatcaagctgcgccagcgcttcgcgcgcctgctggcgcacccgcgaccagcgaaaaaccgcacccggttcagccagcctgtccagcatgatgttttccgcaatgctcagccccggaaccagcgcaacatccacctcctgctgtaccagatgaatccccagttgctttgcatcgcgcggcgaacgaatgctaaccggctggttattgatcaccacttcaccttcgtaatcggcatgcgtcccgcacaacaccgccatcagcgtcgatttgcctgcgccgttggcgccggtcagcgcatgcaccgttccgcccttaagggtaaacgccaccttgctcagcgcctgaaagccggaaaaggccaggctaatgttatgcatctcaaggcgattcacgctcatcaccctccccaggcaattaatattctgatttaacgaatttttcacagccgccgatgcctgacaactgcgtaaaaagcataagctaaaaccaaataatattagccatctggatgtccaggcataacatcaggttaacccaacccccataaggagcgcttcccgccctggcagcgctttagcctgccggcgacgttacccctgacgctttgcgcgcgacgtttgagaaggtggaatacttcagccgttaatcacccagaccatctatacctaatgatgattctcaccactctcgtaacgaggtcatcatgcagatcgatttaacaggtaagaaggcgctggttaccggcgccagccgtgggttgggtcgcgctattgcgctgtcgctggcgcgcgccggcgccgatgtggttattacgtatgaaaaatcggccgataaagcccaggcagtcgccgatgaaattaaggcgctgggtcggtacagcgaagcggtgcaggcagacagcgccagcgcgcaggccattcaggatgccgtaacccatgcagcccgggccctcggcgggctggacattctggtcaacaacgctggcatcgcccgcggcggtccactggaatccatgacgctggcggacattgacgaccttatcaacgtcaatattcgtggggtggtcatcgctatccaggaagcgctggtgcatatgtccgatggcggacggatcatcaacatcggcagctgtctggccaaccgcgtagccatgccgggcatcgcggtttacgccatgaccaagtccgccctcaactccctgacccgtggcctggcgcgtgatttaggacctcgcgggatcaccgttaaccttgtccatccagggccgaccaacagcgatatgaacccggaggatggggaacaggcggaagcccagcgccagatgattgcggtcggtcactacggccagccgcaagacatcgccgcggcggtcaccttcctggccagcccggccgccgggcagatctccggtacggggctcgacgtggatggcggcctgaacgcctgatcgcatattttctgcaagcctctgtcgcccggcagaggccttcccgcgccgcctcgacgggttacgctttgcctcttacctgcgttttttctccgctctactgtactccataagaaattcggaatttatctaatagtcttattatttccttatgttttgtgtgggcgtacagtggaggtacggatgaagattgtctggtcaaaaacggcaaataagcaattttctaaaatcgataatcggtataagaaccgcattaaatccaggctggagaagatgaatgataaagcttcacctatctcggatatcaaaaaattgtcctttcccgaaaaccactacaggctgcgattaggtgattacagagtcatctacacctttggggatccgccggacgatacctgctacgtagtggcggttaaacgccgaaccaccaccacctaccttcatgaggaacataccgaatatgactattcagtacatcaaggatgaagaaggaaaagaccagtatgtcgtcattccttacagtgattactttcgtatgcgcctggctctgctggagtacgacgacgaggatgaaaacaattgggaagatatttcttatgaatcagatatctatgataacgtaatgctgccaggggatgtctgcgacgtgatgcatagagaaaacgtcagcctgcaggccgcgtggcgtatcctgcgcggactctcacagcgggaggtcgcggctaaactcggcatcagccagtccgcggtgtcacagctggaagcgctggactcccgtccgcagaagcggacccgcgaaaaactggcggcgatttacggctgtacccaggagcaaatcagcctctacttaccgaaagaaggctagcagcacttcgccccgcccttaccgccatagcgcgcgtcctggcgttcgcgaaagaactcttcataggtcatcggcgtctggtccggatgcgtgatccgcatgtgttcgacgtagttatcgtaatccggcacgccgatcatcatcttcgccgcctggcctaaatattttcctgcttttgaaagggtgtcgaacataatgagtttctcgcttatttccctcaccccatccctctcccacagggagagagaggagaagaaaggtaggccaaacaggttaatgcgcgcgttttgcctgcgccgttaagccctgcgcatccgcgggcatcgcttcatacggcgtctctttcgccgtcggtttatcctctttcagcgccgccagcgcggttttaatcgagaacagcgccagaaccaccaccacaatcataaagaagatagtcagcccggcatcgagacggttattaaacaccagttgcgccaactgcgattccgtatactgcggcggaatggcgccgctgtcgatcatcgcctggaatttattggcgatggccaggaagccgactttggtatccgggctaaacgacttctgccagccggcggtcaacgtacaaatcagcagccagcttgtcggcagcagcgccacccacgcatagcgctggcgtttcatcttgaacagtaccaccgcgcacagcatcagcgccatccccgccagcatctggttggcgataccgaacagcggccacagggtattgatgccgcccaacggatcgaccaccccctgatgcaggaagtagccccacgccaggacgcacagcgcggtcgccagcaggttagccggcagcgagctggtttttttcaaccccggactcaccacgcccagcagatcctgcagcatgaatcgcgccgcgcgggtgccggcatcaaccgccgtcaggataaacagcgcctcaaacagaatggcgaagtggtaccagaaagagacatccatcagcccgcccagcgagccgtgcagaatgtaagccatccccaccgccagcgtcggcgcgccgccggcgcgtgaaataatcgactgctcgccgacctcgctggcaatctggcgcagcgtatccggggttatgctaaagccccagccgctcaccacctgcgccgccgaggccacaacatcggtggttcccgccggcgccagcaccgccatcgggctgttcatcgcgaagtagacgcccggatcgataatacaagccgccaccagcgccataatggcgacgaaggattccatcaacatgccgccgtagccgataaagcaggcctgcccttcgttggccaacattttcggcgtggtgccggaggagatcagcgcatggaagccggaaaccgcgccgcaggcgatggtgataaacaggaacgggaacaggttgccggtccataccgggccggtgccgtcaacaaacttcgtcagcgccggcatggtcagcgtcgggcgcataatcaggatgccaatcgccagaccaacgatggtgccgattttcaggaacgtggagagatagtcgcgcggcgccagcagcagccagactggcagtaccgcagccacaaagccgtaacccaccagaatccaggtcagctgtacgccggtgtaatcaaaccacggcgcccaggtcgggctttccgccacccagccgccggaaatgatcgcgaacaccagcatcaccaggcctatcaccgacacctcaccgatgcgccccgggcgcagatagcgaatatagatgcccataaagatcgccagcgggatggtaaaggcgacggtgtatgtcccccacggactgtgggtcaatgctttcaccacgatcatcgccagtaccgcgaggatgatcaccatgatcataaaacaggccaccagcgccagtacgccagcggttggccccatctcctctttaaccagttcgccaagcgaacggccatcgcgacgggtcgaaacaaacagcaccataaagtcctgcacggcgccggccagcaccacgccggcgaggatccagatcatccccggcaggtagcccatctgcgcggcaagcaccgggccaaccagcggccctgcgccggcaatcgccgcaaaatggtgaccgaacagcacttttttgtcagtcggaacataatcgaggccgtcgttatgtcgtaccgccggcgtcatccgcgttgggtcaacgccgaggacggttttggcgatatacaggccgtagaaacgatacgcgatcagataaacgcagaccgccgcgacgacaatccacagcgcatttatctgctcaccccggtttaaggcgatatagccgagggcaaaggctccgatcacggagagcagtgtccagataaggtatttccctgaattattcattgttgtggtccaccggtagggtaatcaggatgttacagtttgtttctagaacacaacgcagagtttaacaacttcgaaacagcgcagatgccatgccgcggcggagatttgtctcacattgctagcgagatcacttaaggcaggaaaataaatgaaaggattaccgtgaacggtgccgtttttttgtcgggtggcggctaacgccttacccgacctacagatccgtagcccggctcagcgcagcgcaagccggggaaatagcagcgtcttagccaagcaccgcggttcccagacgacaggtgcagcagcgccgccctttttcgtcatacaccacaatttcccagctctgactctggcggccaagatgcagcggtcggcattcgccgcgcactttaccgctggagaccggacgatggtgggtagcgttaagctcggtgcccaccacacattgcccttcttcggtcatcagccaaccggccatcgagcccagcgtctccgccagcgccgcggaagcgccgccgtgcagcagaccaaacggctgatgcgtgcgcgcatccaccggcatctccgcctccagcagcgcctcctccagccgggtgtagacaatatccagatgcgccaccatggtgttttcgctactggcgttcagcgccgcaagcgtgagctctcgtttccaggccatctacgcccccagcgtcgagccgccatcgaccacaatatcctgcagcgtaatatggctggcgtgagaagaggcgaggaacaaaatggtattggcgatctcctgcggtcgggcgattttgcccagcgggatgccaagcttaaactgctcgccaaatccgcggatccgctgctgttcagcatcttcattaacccacagggtacgttgcatatcggtgtcggtggagcccggcgataccaggttgcagcgcacgccgctgcctgccagctcaagcccgacggtcaacgccaggcttttcagcgccgctttcgaggcgccataggcgctcatgccgatacgcggcgtatgcgcggcatcggaggcgacggtgacgatcgccccgccccgctgacggcggaactgcgccatcgtctgctgaaacagattaaacgcgccgccgacgttcaccgcgaatgtctgctgccagtcctccgcgctcaattgatcggtcgcccccatgcgcaggatcccggcggcattcaccagcacgtccagtcgttcgatatcgttgagcagacgcgcgcaaacgtcgcgtacctggtcggcatcggcgacgtcgagcatttcggtggcaaacggataaccttcgccgtcaaaggcaaggtcgaaaccggtgacgttggccccggcctcgacgaaagccaacgcggtggcatagccaatgcctttacctgcgccagtcacccacacggtctggccgtgaaaatccagcgccgccattatttcacctcgcgggagagcagcgcccaccaggcgtcgatggtcgggtttttcgccagcatcacgaagtcgatatcgccgtgtactttgcgccagcgggcggccagcgccatcatacgcaccgaatccagaccgtagtcgatcaggttttcatcatccagcggttcgtcggattcgtcgagcagcggcagaattagtgcgcgcagcgccgctttggaggccggcagcggcaacaattcttcggtcatcaccacgcgtccagaacggccggcgacgtatttcagcgccatcaaatgctcttcgcggctgaaatctgccagcgcgtcggcgacaaagaacggtttgatatcgcgcataaaagcgtcggtggcggtggtcatgcagccgatatgggcgtaaacgccggtgatgatcagctggtcgcggccggtctctttcagcatctcttcaagcggtgagcgatgaaacgcgctgtagcgccatttcaccagcaccgtatcctgttcatccggcgccagcgcggcaattacctgttgctgttccggcgagcgagtcaaccccggcccccacatatcattcagcagggcgcggtcttcatcgctctgctctttcggctgggcggtgtagtacaccggaatgccgttttgtttgcagaagtcgcgcagggcggcgatattggccaccactttttccatcatcgcgctgttttcgccccagaagttgaggaaatactcctgcatatcgtggatcagcagcgcggcgcgcgacggctcaaaggcccagttaactttgttggccggaatatcgctggcttccggcagcgcgtaagcctgtaatttggggattgccattttctgttctccttcagcccagcttgccttcggccagccactgacgtaattgttttttatcgactttgcccaccggcgtcagcggcagcgcggcaacgcactccacgcgatccggcaatttaaattccgccacgccctgctcgcgcaggaagcggcgcaccgcgacggcgcgcagcggcgatgtcaccaccagataagcgcagctcttctcgcccagcagattgtcttcaatgctaaccagcgcggcgtggatcaccgcctcatggcgcagcagcaggttttctatttcttcagcggcgatcttctcgccaccgcggttgatctgatctttttcccggccctggacggtgatatagccatcttcatcgatcgaaatcagatcgccggagcagtaaaatccatcggcatcaaaggcttcagcgttatgttgcgggctgttgtaatagccgcggaaggtataagggccgcgggtcatcagacggcccacttcgccgcgcggcagcgggttaccgtcggcatccgccacccacacttcgtcgtcaggacacatcgggcaaccctgggtgttgataatccgctgcgggctatcgttgaggcgggtgtagttaaccagcccttccgccatgccgaacacctgctgcagctggcagccgatttccgccgggatacgcgcggcgagcgtcgcggacaggcgcgctccgccaacctgcagcagcttcagcgattgcagttgcgcgttgctgccccattcatgaatagcctgcagccacaggctgaccgccggcggcaccagcgacgcgacgttaatctgatgtttttcgatcagcgggaaacacaacgtggcgctcgggtcagcggcgaggatcacccggccgccggcgagaaagacgcccagcgatcccggcgagctcatcgcatagttgtgcgccgccggcagcgcgttgagatagcgcgtgtcggcgttaatcccgcagatctcgttgctgcggcggatactgtagtcgtaatcgttatgggttcgcggaataagcttcggcgtcccggtgctgccgccggagagctggaaaaaagccacttcgtcagccggcgtcggattggcgacaaagttatccgccgtgcggttaatttccgttgccaggtcgcgctcgccgccatcgttacgcagcagcgcgacgcgcagcgaaggatgctcagcgataaaaccattaaggaaactatcgtcagcaaacagcgcgtgctcgcgatcggcaatcagcagcaccggtttaatctgcgcggcataggcgttgagttcgctgcgctgatggctaaacaaagcgttaaccggtgcgacgccgatgcgcagcagcgcaaagaaggtaatgtagaactcggcgacgttgccaagctgcaccagcgcggtttctccgcgcttgagtccctgatgctgcagggaggacgcgaggttatccaccagttggttaaactggcggtagctaatctgccgctcgccgtcgataatcgccacggcgtcattgtccgcatgacgagtaatcagattggttaacggcagatcctgccagtagcctttttgacgatagcgggccgcaaactcttccggccaacgggtaaatgcaatcatccttgcctcttaattcaagccaaatacgttgagcatggtggtgagtttaacgccggtttcacgccattcgcccagcggcgaagaggccgggacgatacccgcgccggcaaacaggcgcagcgagcgttgatttaagcgcgcgcagcggatggtcaccacccattcgccgttgccttcgtcatcgcaccagccgacaatgccgccaaacagttggcgatcgaacggttcgagctcggcaatcagccgcttcgccacctggtgcgggaagccgctcagcgccggtgtcgggtgcagcaggcaggccagcgacatggcgttttcttccgccagcgccgtaccttcgataggcgtcgccagatgccagagcgtcggggtggtaatcagctgcggcgattccggtagcgacaattggctactgcgcgggcccagcacgctcttcatcgcctgcgtcaccaactcgtgctcatggcgatctttgcctgacgccagtagcttgttacccgcttcccggtccagcacatcgtcaggctggcggcgggcggagccggccagcggcagcgaactgaagtgcagtccttctttacgcagtagcagttccgggctggcgcccaacaataccccgccatcagatagcgggacatggaaattaaagctcgccgggttctgggcgatcagccgttccagcagcgcgccgctatcaacccggtcgcgggtcgtaatatcaatcagccttgatagcaccactttgtcgacttccggagtcgccgttagcgcggcggcgcgttccaccatcgccaaaaactcgtcctgttccgggatctcctgacgatcgacaacatccatcgccttgagcggcgccgcataacgcgcggactgctgtttgtcggtacgggagaaggtttcccagcgttcgggaatatagagctcggaaggctgattggtgtcgaacgggatcgccccgaccatgaccggcttgcggatccccgccgcgcgggcctcggcaaatgcggccgccattttctgctggaactcgccgttcagtgaatcaccgccgacggcaggttgggaaaaacggctaaaacagccggtggtgctgaagctgcggtacggcgacataaagaagaagctttgcggcgacagggtctgcgttttttcctgtacatcctcagccagtgacgtttccatatcatcctccaaaaacgataaagatattaagaataattatcatttatatttttgttggctaacctaaaaggtattgctctccttgtcaaccgcacaaacagcaggttatgcgacttacacttgcatccggacaatacaatgttgaaaatgagacgtatttactacaactgactcaggatgcgaattcgtgaattttgccactttttgtcgtcgtactttactcgccagcgggctgtgccttttaggaattacctcagcgctggcggcagactggccgcgtcagatcgtcgatagccgcggcactcatacgctggaaagccaaccgcagcgcatcgtctcgaccagcgtcaccctcaccggctcgctgctggctattgatgcgccggtggtcgccagcggcgcgaccacgccgaataaccgcgtggcagatgcgcagggctttctgcgccagtggggcgatgtcgctaaaaagcgcaacctggcgcgactctatattggcgaacccagcgccgaagcggtggcggcgcagatgccggatctgattctgataagcgccaccgggggagattccgcgctggccctgtacgaccagctgtcgactatcgcgccgacgcttatcatcaactacgacgataaaagctggcagacgcttcttacccaattagggcatattaccggtcacgaaaagcaggcggacgcgcgcattgccgaattcaataaacagctcgtttcgttaaaagagaaactaaagttgccgccgcagccggtcaccgcgctggtttataccgccgcggcgcacagcgccaatatctggacgccggaatcagcgcagggtcagatgctggaacagttaggctttaagctggcgacgctgccgggtaacctgcacgccagccagagccagggtaagcgtcacgacatcgtacagttaggcggcgagaatctggcggccggaattaacggcgaaagcctgttcctgttcgccggcgatgagaaagacgccgaggccatttacgccaacccgctactggcgcacctaccgtcggttgccgctaaacgcgtttatccactggggaccgaaaccttccgtctggactactacagcgccatgctggtactgcagcgtttatcggcgctctttgcctgattctctccccggcgccctgcgccgggatctcatttcacatcatcaacaacatcatccttttgttataaaagtattttttatttctttcccctcttgatacctcatcggcgcctcacgcgaatcatcatcgtttcaaatgttgttttgtgattagccatcgtcgccgccttccccgagtatctgccccacaccacttgaggtggacattcaactcagaaggaacttaccgtgaccactagcaaattgatcaagggcgataccctgaccgaaaccagcaacgccgcagatggttttaacccggcaactgaagtcagcaactacagctatacgtcagaccgcgtcgctaaaccggtctataacaaatacaaaagtgcgaccaccaaaccaaaggtctttggttactacaccgactggtctcagtacgatggccgtctgcagggcagcgatgcgaaagataaccgcggacgcggctacgacctgaccaacgtctcccctaccgcttacgataaaattatcttcggtttcgtcggcgtgaccggcttccataaagtggatggcctgtggcgtgatgtggtggccgaaggggctgagcagtgcggcaaagtcaaatatgaaccgactttcctcgacccgtggggcgacttccagtcttacgttaacgttggccacagcgtcagcggctgggatgtcgatccgaaaaccgtaacccagacaaacaccaaaggcctgctcggcggtctgcgcgacctgcaagcgaaagccaaacaacagggccacaacctggtgctgtccatgagcatcggcggctggagcatgagcaacggttttcatgaaaccgcggcatctgattcctcgcgtaaaatcttcgctaaaggcgtggtgaagctgttcaaacagttcccgatgttcagcgaagtggatatcgactgggaatacccgaatgccgaaggcgccggcaacccctacggcccggaagatggtgaaaactatgcgttacttattgccgaactgcgtaagcagctggattctgccggcctgagcgatgtcaaaatctctatcgccagctccgccgtggtgaagacctttgattattccaacgtcaaagcgctgatgaatgccggtctgtacggcatcaacgtcatgacctatgacttcttcggcaccccgtgggcggaaagcatcacccaccacaccaacctgaaagccattgagcaaggcggctgggcgattaacaccatcgttgaacatctgctggcggaaggtttcccggctgagcgcatcaacatcggttacgccggttatacccgtaacggccgcaacgccgagctggaatccctgtctccactcaaaggcacctataacccgggtaacggcaccaccgtcggttcctttgaatccggtaccaacgaatggtatgacgtcatttataactacctggatctggaaaaccagaaagggcgtaacggctttaacgtctataccgatcaggttgctgacgctgatttcctctacaacccggaatccaaactgtttatgtcgctggataccccgcgcaccgtcaaagccaaaggggaatacgctgccagtctgggcttaggcggcctgttcacctggactatcgaccatgataacggcgtgctggttaacgccgcccgtgaaggtctgggctacgaaatcgcctctgaagttatcgatatggagccgttctatttcgaaggcattaacgttgtgccagctgatgaacaagaagacgataagtcagaagatgagccaactgaaccgacggtaaaccatgcgccggaagcggcaattgaaatgatggtcgtaggcggctcccgcgtacgcctgtccggggaaaaatcgtctgatgaagacagcgacgagttgagctacagctggggcgtgccggcagcgattgatgttgcggataaaaccgccgcggttattgagttcgatgttccggaagtcaccgcggataccgagttcactttcactctgttcgttcgcgatagctggggcgaaccgtcaacccagcagcgctttattctgtcggtggtcgtcgcctcccagggtgaaccaagcgctgacgagccagccgatgagccggcagatgaagcggctgacgatgaaaaagacgccgatgacgtgccggcacaggaagacgatgttgtaccatctgacgaaaccacgccttacccgctgtgggatgccaaaaccgtttatggcggcaactggggtacctttgaaaccgtgagctggaaaggtcacaactatcaggtgaaatggtggtctcagggcaaccagccagacctgaactgcggccagttcgacgtctggaaagacctcggcgcatactaagtgttataagtgaagccaggccccggagcaatccggggcctttttgctattgtcgcgcttaactttcgcaggcctgctccggacgctgaaaacgacgtagctcgcgcaataagccaatcagtaatacgccaacaatcaccagcgcccagccgctggcgctggctgaagccaccggggtcataaccgcccctaatccccccagcagcgccgcgccaatagcatcgccggtcacgttctgcgcggtccacaggccattaatgcgccccagcatattttccggcgtttgggtctggatcagcgtgtattgtagcagcgagcttatcgcgctcagccaaccaaacagcgccagacagagcgcgcccagcgcccagaacggcatcacgctgaacagcgcaatcgccacaaacgaccctaccgtcgttatcagcatcaacgcccccggcttcgcggtatgcgccagttgtccgctggttaacgcccccagcgccgcgccaagcggaatggcggcatacaacaggccaatctgcgaatttgacatctgccagccttccgccagcgccggataaagcacccgcaccgcgctggccatcgtcaacaggccgccgagcagcgcaatgccgccaataagcgggctattaaagagaaatttcagccccgccagcaatgatttcagcggatgctcgcgcggctgcggcggtggcggcagcagcggcaggcgtagcagcgtcagggtggtaatgaacgtccccgccgccgccaggccatagttccaggccacgccgccggtcgccagcaatagcccgccgatcatcggcgatatcaccgaaccgagacgcacggtcagcatggtgatcgctccggcctgcatcaggttttcgcggccgactaaagccggcgttgccgccagaagcgcggtcacgcccaaagaggcgaagaagccatcccagatccccagcaggtaaattgccgccagcgagggttccggtagcatagcgttcaggcacaggccgacgaagcccacgccgcaggtgccacgcgccagcaggatcaggcgtttgcgttcataacggtcggccagcacgccgccgaccatcagcccaatgaacatcgaacagccggtcagcatcaccgagagccccacctgccaggtcgaatgggtcatcatctggatttgtaccgggatcgccacgcctagcaggccaagcgacaggatagagataaagcgagcgataaagacggcgcggaacgccggatgggtgcgcaggaggctgacatcaagcagccgggaaggtcggttcatgcaagggccttgtcgttatttttcataccatttttatggtttctcatggtaacatacctgaataaaatcgataacgataattaatatcattatcatgtcagggatttgaactatgtcgttttctacgaccacggtgcgcgccgtcgccgtgcctggtctcttgttacttttagctctcgcgattgcgctcagcctgcttatcggcgccaaacctctgccgccttcggtgattgtcgatgccttctccggcagctgtcagagcgccgactgcactatcgtactggatgcccgcctgccgcgtacgctggccggattgctggccggctgcgcgcttggcctcgccggcgcgctaatgcaaaccctcacccgtaacccgttggccgacccgggcctgctcggcgtcaactccggcgccagcttcgccatcgtgctcggtgcggcgctgttgggcatcacttcgccgcaggagcagttgctgatggccttctgcggcgccttcgtcgcgtcgctactggtcgcgtttaccggcagccagggcggcggccagcttagcccggtgcgcctgaccctcgcgggcgtggcgctggcggcggtcctggaaggcttatctaacggcatcgccctgctcaacccggacgtgtatgaccagctacgcttctggcaggccggctcgctggatattcgcaccctgcaaacgctgaaaatcgtcctgctgccggtgctgattgccgccgtggtaactctgtttcttagccgggcgctgaacagcctgagcctcggcgccgacaccgccaccgcgctcggcagccgggtcgcgcgcacccagcttatcggcctgctggcaattaccgtcctgtgcggcagcgcgacggcgctggtcggccctatcgcctttatcggcctgatgatgccgcatatggcccgctggctggtgggggcggatcaccgctggtcattgccggttacgctgctcgccacccccgccctgttgctgtttgccgacgtgcttggccgcctgttggtgcctggtgaactgcgcgtttcggtggtcagcgcctttatcggcgcgccagtgttgatctggctggttcgccgtcagccgcgaggaggtgcgctgtgatggctccctcccgccgcctgatgttctgctgcctgctgctgatcgccgccagtctgctggtgtccctgctcggtctgggtaatggcctggtgccgctcagcattgaacaggtggtttccgcgctgctcggcgacgcgccgcgcaacgtcagcatggtggtcaccgaatggcgcttgccgcgcgtgctgatggcgctgctgatcggcgccgggcttggcgtcagcggcgccatttttcagtcattaatgcgtaacccgctgggtagcccggacgtgatgggcttcaacaccggcgcctggagcggcgtgctggtggcgatggtgatgttcggccagaacctgaccgccatcgcgctggcggcaatgcttggcggcgtgctgacctcgctggtggtgtggctgctggcgtggcgcaacggcattgaaaccttccgcctgatcattatcggcatcggcgtgcgcgccatgctggtggcattcaatacctggctgctgctgcgcgcgtcgcttgagaccgccctttccgccgggttgtggaatgccggttcgctcaacggcctgacgtggggcaaaacctggccatcggcgccgctgatcctgctgatgttagcgtgcggcgcgctgctggcgcggcggatgcgactgctggagatgggcgacgataccgcctgcgcgctgggggttcaagtcgaacgttcacgcctgctgctgatgctggtggcggtgctgctgaccgcttccgccaccgcgctggccgggcctatttctttcgtcgcgctggtcgccccacatatcgcccggcggataagcggcaccgcacgctgggggttaacccagtcggcgctgtgcggcgcgctgctgctggcgctggccgattactgcgcccagcgcctgttcatgccttatcagttaccggtaggggtggtcaccgtcagtcttggcggtatctacctcatcgcgttattaattcaggagtcccgcaaaaaatgaccgctgtaacttcccgtttgcgcggcgaccagttgaccctggcctacggcaaaaagaccatcgccgaatcgctgaacgtcacgattcctgacggccatttcacggcgattatcggccccaacggctgtggtaaatcaaccctgcttcgcaccctcagccgcctgatgaccccgtccagcggacacgtttatctcgatggcgagcagatccagcactacgccagcaaagaggtggcaaagcggattggcctgctggcgcagaatgccaccacgcccggcgatatcaccgtacaggaactggtggcgcgcgggcgctatccgcaccagccgatgtttacccgttggcgtaaagaagacgaagcagcggtaaataacgcgatgcgggcgacggggattgtcgacctcgcgctgcagagcgtggataccctctccggcggccagcgccagcgggcgtggattgcgatggtactggcgcaggagacggcgattatgctgcttgatgagccgacgacctggctggatatcagccatcagatcgacctgctggaactgttaagcgagctgaatcgcgagaagggatatacgctggcggcggtactgcacgatctcaatcaggcctgtcgttacgccacccatctgatcgccctgcgcgacggtaagatcgttgccgaaggcgcgccgaaagagatcgtcacggcggatctaattgagcgtatctacggtctgcgctgcacgatcatcgacgatccggtggcgcatacgccgctggtagtgccgctgggtcgccgataatcttttctataccatctcaaccatcgcattcccggcttgcgctgcgctgagccgggctacccaaaacgggtagcccgggctctaccgttaccccagaatctcccgcactaccgggcctatcgcttcaaaggcctgcggcgagataatctcgacgtgggcgcagttctggctgaacacctccagctcgccaacccatggcccccatgcgacctgcggatccatccctttctggcgcgttttctccgccacaaatagcgttgccttgccgtcaaacttcgcgctgtgcgcggtcgtcaacaggcgcaccgcatcggcgtagttaccttcgatcgcgctgaacagctcgccggaagcctgcccctgctgagcggcgagaaacgcttcgcgctcgcgggcgatttccgccagcacttcgggatccagaccgttcgcctctttctccgcccagttttgcgtctccggcggccaggtatccagcaggccgaggaacgccacctcttcgccgcgctggcgtaaacgggcggcaatcccctgcgccagcgttccgccgagcgaataaccaaacagatagtaaggcccatgcggctgctgcgctaaaagcgtgcgcagatggtgctcgcagacttcgtcgaggttggcggcggaagccatcggccccgtcggacgcggcgactgaataccggtaattgaccagcgcgggttaagataacgcgccagcacgctgaactgccaggcaaaaccggaggccggatggaagcagaacagcgtcggaccgtcgctctcacgcagcggcaacagcgcatcgaagcccaggcgctgcgcctgctcgtcgctcaggtcagaagccagcagcgcgctcagcttgccgaccgtcgaagcgaccatcacctgccccggcgtcacctgccgcgccagctcgcggctaagctgcgccgccagccgcatcgccagcagcgaatggccgccgagggcgaagaaatcggcgtcgatgtcatttacctcgcagcccagcagctggctgaacgccgcggcaacggccatttcggtagccgattgcggcgggcgaccgctgcgctcgctgcttaaggaggggagcggtagcgctttacgatccagcttaccgttggcgctgagcgggaaggattccagctggattaacaccaccggcaccatgtgcggcggcagctgttcgctaagacgggctttcagcgccgccacgtccagcggctggccggactcgctcaccagataaccgacgagctggcgggcatcgccgccggtggccgccgcctgattgaagacgcaggcgtggcacaccgcctgcgcgacgtccggcaacgccgccatcacccggtcgatctcgccaagctcaatgcgctggccgcgaattttcaactgatcgtcgctgcggccaagatactctaccgccccgttatccagccagcgcgccacatcgccggtgcggtacatgcgctcgccgggggcaaacgggtcggcaataaagcggctggcggtgagatcagatcgccccatatatccctgtgccagttgaatgcccgttaagtacaaatcacccgccacgcccggcggcaccaggcgcatggcggcatcaagaatacgtaatccggtgttccataccggccagccgataggcacgctgttgccggttaccgccgccagctctggcccgcaggcgggataccaactgacatccaccgccgcttccgttggcccgtacaggttatgcagcggcgcgccggttaagcgttcccattcgcgacacagttccgtcggcagcgcttcgccgctacagaaaacgcgttttagcgtccggcaggaagacacattatcgctatccaacgaggcgacaaacgccgccagcatcgacggaacaaagtgggtggtggtcacgccgtactgcgcgaagaaccgctgcatcgcctgtggatcgcgatgcgcctccggcgccgccatcaccagctgggcgccggtcataaatggccaccagaattcccataccgagacatcaaagctgcacggcgtcttctgcgccaccacatcggcggcggttaacggatagtgattttgcatccacagcaggcggttcacgatggcggtctgcccgaccatcacccctttcggccgtccggtggaaccggaggtgaagatgatatacgcggtatgttccggttttgacagcgccagcggcgtatcatcttcagcagccagcggctgctcataacacaagctggtcagtcccggaatatcgctaaaacgggccagttgatcgtcagaggtaatcagcagcgaaggccgcgcatcttccagcatcatccgcaaacggtcatccgggtagccggtgtccagcggcagccaggcggcgccggcttcgacaatgccgtgcagcgccagcgtcaggaacaccgaacgcggtaaggcaaccgccacgctatcccccggcttcacgccgcgttgccgcagcaggttggccagcgccaccacctgttggcgcatttcgcggtaactaaagcgccagttggcatccgccagcgccggagcatccggcgttttccgcgcctgttcagccaccagcgagctgagggtagtggtcggcagtggcatcgcggtattgttgatcaatgccagctgcgcgccttcttccgccgacagcatctccgcctcgccgcagcgtagcgccggattggcggcgaactgcgccagcagcgcagtcagacgcgacacgtggcggttcagcgtcgcctcatcataacgcgctttattggcgaggatctccagcgacagaccgccgcgttcgtccgggaataatgccagctcgaggtcattcaccgggccggtggcgagggtatgcgtctgcgcctgcacgtcgtcgatatccaactggtaatcaaagactttgatgttcagcaccgggccaaacagcggttcgtcgcccgccgctttaccgctatcgcggacaatttgctcggcatcgtagcgctgatggcggcgcatttttttcagttgtccggagagacgcgtcgccagttgcgccagcgtctcctgcgcgtcgatattcaccgccagcggcagtacgttgagtaccgggccggtggcggtcagcgccgccgatcccatgcggcgcataaagataaagccagccgcgtaatccattcggccgcacagccgccccagccacaacgtcgtcagcgccaacgccagatcggcgcgctggcactgcggcgcgctggccgcgagttggctgaagacagccggatcggcctccagtttcaggcgccagatatcgctgctggtcgcccgcccggccagcggcgcgtctgatagcgaggccggagacggcaacgcctgacgctgcgcctgccagaaggctttatcgcgctgccacgcctcgctgccgtagtagcgctgatactcttccaccacttcggcgaacggcgtaaacggtgaatccggcgtctcttcgccgcgttgccaggcgcgataaatagcggcgatctggcgggtaatggccgggaaactaaaaccatcgaccagtaaatggtgatagcgctgataccagtaccagcagtcgtcgccaacgcgcatgagctgatggcagaccagcggattaccgctgtcgacgcgcagattctgcccgagatcgctttgcatcagcgtcagcgcggacatatgcggatcggcctgctggcgcaggtcaacgctttgcggctcggcaaactcgcgcgcgtcatcaacccactgccacgcttcgccattatcttcgcaaaagcgcatgctcagggtatcggcctgcttaagcccggcgacgatcgccttactcagcagcgccggatcaagattgccgcgcagttcaacatagtgggcaacgctccaggcgccgggtagcgtggagaggcgttcagccatccaaattcccggctgcgccgcaaccagcggtaaacgtgtactcatcgaaagctcctcaggaggcgtagtgcgctgggataagggttgaccagttggcggcaagccaggcgttgcaggcctctaatgactgcggcggacactccaccgtccagcctgtcggcagcgcgcagtgatgcggccacaaactatattgcccctgtgcgttgcgcagaatgtaaaactgcccttgcggattgtcgaaggggttgctgaattgcatctctcactcctcattaagcgcgtgttgttgcccgcggcgcaaaggctgccacagctggataagcccggacgtcagcccgccgcgccagcatagcgcgtcatgaccgccgtcaacctggcgccagaaaacggacggcgtgctctgccgtagttgcgcgaaaagcgcctggttggcgcgaaaaataatcggctcgcgcacgccggcttccagccagatacgcagcccctgcggtcgaagctcgccgcgctgcagttgttcaagtatcactcccggctggctactgccgcgctgcggccaccagtacgaccccgactggctcagaacgcagccaaaacgctgcggccagtggagcgcggcatacatcgccgccagaccgccgaagctctgccccgctactaccgtccggtcggcgcgatcgctgaatggcgccacggcctgcaccagcggcagcagttcttcctgtaccgccagccagaaatcacgattgcagggcagctccacgccgcggtgttgattgtcgataacgtcgatcagcacatagaccgccggcggcaggcggccttcccgcgtcagccccgccagcggcgcaaagacaggcatgctttcggcccagaactggccgtcaagcaggaccgccagcgggcgatccgccccactgccggtggtgtaaatccacactcgtcgctggtttcctaatcgctggctgcgccattcaatacagcgcggcgctggcgaaaccggctcgcgataatgccaacccggctgttccggcgcctgcggcagttccagcgctgagaccgcgtggccgcgcccccccttccagctttgcggattgcggggatcggcaaccgcccgcggcagcagtttgcgccagccttcgcgcagtagcgcgcggtccggcgcttcaccgttaaagagctgcggggaaaaatcgtcgtcgcgttcggagggaataaaacagtagctgccgcgccagctggcggggagcgtggtttgccagcaccaggcatcggtacctgggatgcgctgcagggtttgcggcgccgcgttgtggtgatgatcggtgacgccggtaatgtaaatccacacccgccgaatcggcgacgtggtttcgctgcctgccggatcgcgccaccagaaggtcacccgatatgcgtcgcccagcgcctctgtctgcgggccggcgatcccccgccaccagtcgtcacttcccgttatttgcattccgtcagtaaccctatgtttaccgtgatttttatcaacaaaggtaatatttattgataatattattgataactatttgcatttgcaatagcgtattaacgcgcctatgggtagcgcgtcttctcattacattaaatcaaggtcagagagggtcttttcagagcgtttggctcggtcggctacggaaagcgttcaccttctactggctacatttatgccgcctcctctcccggtgggaaggggcttctggggaaagcggcaaagaaaagcggaactgacttacaatgaataacaggattaagtccctggccttaatggtcaatctgggtatctacggggtggcattcccgctgagcgcggcggaagaaaccaccgacagtaaacaagccgccggtgaagaaacgatggtggtcaccgccgaggtgcaaaacctacaggcgccgggcgtttccaccattaccgccgatgaaattcgcaaacgtccgccggcgcgcgacgtctctgaaatcatccgtaccatgccgggcgtcaacctgaccggcaactccaccagcggccagcgcggcaacaatcgccagattgatattcgcggtatgggcccggaaaacactttaatcctgattgacggtaagcccgtgaccagccgtaactctgttcgtctcggctggcgcggcgaacgcgacacccgcggcgataccagctgggtaccgccggaaatgatcgaacgtatagacgttatccgcggcccggcggcggcgcgttacggtaacggcgcggcgggcggcgtggtcaacatcattacgaaaaaattcgacaaccagtggcatggttcgtggaacgcctacatgaacatgccggagcataaagacgaaggcgcgaccaagcgtaccgactttagcctcagcggcccgctgggcggcgatttcagcttccgcatgtacggtaacctcgataaaacccaggctgacgcctgggatatcaaccagggccaccagtctgaacgtaccggcatttacgccgataccctgcccgccgggcgtgaaggggtagaaaacaaaaacatcaacggcgtggtgcgctgggatttcgcgccgatgcagtcgctggagtttgaagctggctatagccgccagggcaacctgtacgccggtgatacgcaaaacaccaacagcaacgatctggtgaaagagaactacggtaaagagaccaaccgtctctatcgcaatacttactccgtgacctggaacggcggctgggataacggcgtgacaaccagcaactgggcgcagtacgaacacacccgcaactcgcgtaaaggcgaaggcctggcgggcggcaccgaggggatcttcagcagcaaccagttctcggatatcgatctctccgacgtgatgctgcacagcgaagtcaatattccgttcgatctgtgggttaaccagaatctgacgctgggtaccgaatggaaccagcagcgcatgaaggacaacgcctctaatacccaggaactctccggcggtgaaatcccgggctacgacagcaccggccgcagcccctattcaaaagcggaaatcttctcgctgttcgccgagaacaacatggaagtgaccgataccaccatgctgacgccggcgctgcgtttcgatcaccacagcatcgttggtaataactggagcccgtcgctgaacctgtcgcagggtctgggcgacgactttaccctgaaaatgggtatcgctcgcgcctataaagcgccgagcctgtatcaaaccaaccccaactatattctctacagtaaaggccagggctgctatgcgagtaaatccggctgctatctgcaagggaatgatgacttaaaagcagagaccagcatcaacaaagagatcggcctggagttcaaacgcgacggctggctggcgggcgtcacctggttccgtaacgattaccgcaacaagattgaagcaggctatgctccggtctataccaacggcaaaggcaccgatctgtacaaatgggaaaacgtgccgaaagcggtagttgaagggctggaaggcacgttgaacgtgccggtcagcgagacggtgaactggaccaacaacatcacctacatgctgcagagtaagaacaaagagaccggcgatcgcctgtcgattattccggaatacacgctgaactcaacgctgagctggcaggtttatcaggacgtttctgtgcaatcgaccttcacctggtacggcaagcaggaaccgaagaagtacaactacaaaggccagccggtcaccggcagcgagaagaacgaggtcagcccgtatagcatcctcggcctgagcgcgacctgggacgtgaccaaaaacgtcagcctgaccggcggcgtggataacgtcttcgacaagcgccactggcgcgcgggtaacgcccaaaccaccggcggcgacaaaggttatatgtacggcgctggcgcggagacctataacgaatccggccgtacctggtatatgagcgtcaacacccacttctgataatattaatgtctgacgccctccccgccgggagggcgtttttttcaacactgcgctattttctgtacccgcgcgacaatcgacgccgcgtcaaaaccgtgatgttgacgcagccatccgcgatcggcggccgctgcatactcgccatccgggatccccagacgctgcaaggcaatccccgtacccgcttccgccagcacttcggcgaccaggctccccagcccgccattgacgttatgttcttcgacggtaataactgaacggcatgactgcagcgccgccagcagcgccgcggtatcgcagggacgaatcgacggcacgctgaccactttcgcctcaatgccgaggtcggcaagctgctgcgccgcctccaccacttcgtgcacggttgaaccggtcgccaccagcgccaccgctgcgccttcgcgcagggtcagcaccgcgccgggcacaaaacggtacgcttcgtcatgcaactccggcagcgccttgccgtcaaggcggatataaaccggcccctgatacgccagggcgtagtcgataatctgccgacattcgcgcggcgtggagggggcgaaaatctggatattgccgaaaccgcgcattaccgccaggtcgtcaatagcatggtgggtactggccaatgggccatagctggccccggcgttaaggccaaagagcttgacgttggtgttgttgtagcagacatcgactttaatctgctcgttagcgcgggagacaaggaacggcgcggcgttacaggtcaccgccactttaccgccgagcgccagcccagcggcggtgccgaccatgctctgctcggcgataccgacgttaaccagccgtccggggaactgcttaataaagggagcgatcttggccgttgaggtggagtccgcgaccaccggcaccagatcgacgcccttttccaccgcggcgataaacgcctcgaccatcacattcgccaggtgttctgcattactcatctttcagttcctccagcgccagtgcgatttcctcgcctttcggcacccggtggtgccactccgggcgcccctggataaaggagatgcccgcgcccttcgtggtgttggcaataatgacgttaggtttaccgttctgctgcagcccttcgatagccgcgaccaccgaggccatatcgttgccgtcgcattcgctgacctccatgccgaaggcgcgccatttatcggccagcggatcggtattcataatttcacgggttggcccggccagctgaagattgttcttatcattaataatgaccaggttatcgaggccataatgggccgccgccagcgccgcctcccagttactgccttccgccagttcgccgtcgccggtgattaaaaagatgcggcgggggctgttgcttttcttcgcggccagcgccagccccaccgcaacaggcaaaccgtgacccagcgcgccggtattaagctcaatgcccggcgttttctgccgcaccggatgaccgggaaggtgcgagttcgcgtgctggtaggtctccagccaatcgatcgggaagaaaccggcttccgccagtacgcagtagtagcagcccaccgcatggcctttcgactggatatagatatcgcgctgcgggtcgtcaagacgatcgggcgccgcattgagtacgcggaaatagagcgcggttaacaattcgacctgcgacaggtcagccccggtgtgaccgccagccggactattggcgtttaagcggacaatgtggcggcgcacggcgcgcgctttgcgctcaagcgtctggatatcaaatctgtagggattcatttaacacctctgaatttattttcaatatggaatatttattccaacaggaactaaaaaaaccagatatccccatgtcggtggttagccttacaccactgcgccgtactcaggaacattctgcctcccgctccaggcaagcccggataaactcgttgactcaaagccaccttgaatatatattcaatgatgattctttattcgattatggcctggctgttttgtttttgtccatagtcgattttgatgagtggtaaaaatttgaccaccatcacacttaagtgtgattttttttcgcgtatgatagaagtcactacgataatggctgcagctaaacgcctgaagaaaggcgataaatgatttacgaggataaatatggctaagcaggatgaacaacggctattggtgaagattgccacgctttactatctggaaggacgaaagcagtctgatatcgcccaacttctctctctgtctcagtcatttgtctctcgcgcgattacccgctgccaaaaagagggcgtcgtcaaaatcagcgtcgtgcagccatcgaatatctttctcaatctcgaaaaggggcttgaggatcgctacgggcttaaacaggcggtggtggtcgataccgaagaagaggccagcgaccataccatcaagcgggcgattggctccgccgccgcgcactacctggaaacccgcctacggccaaaagatctgattggcgtctcttcatggagttcgaccatccgcgcgatggttgatgaggtccacgcgcaaaacctgaaggccagcggcgtcatccaactgcttggcggtgtcgggcccaacggcaacgtgcaggcgacgatcctcacccagacgctggcccagcgtcttaactgcgatgcctggctgctgccgtcgcagagcatcgaaggctccatggaagagcgcaatcgcctgctggccagcaaagatgtcgccgacgtggtttcacgctttgacgaggtcgatatcgccattgtcggcattggaattctcgaaccttcccagttgctgaaaacgtcgggtaactattatcacgaagatatgctgcaggtgctggcggcacgcggcgcggttggcgatatctgcctgcactactacgacaaatatggccagccggtgttacgcgaagatgaagatccggtgatcggcatggcgctggagaaagtcaaaaaatgcccgaacgtggtcgcgctggccggcggcaccgacaaagtcgcggcaattaaaggcgcgcttaccggcggctatatcgatgttttaatcaccgattaccctaccgccagactactggttagcgactaatcctccgcagttttatgcctcgtcaatccctgaggctgtttttcagcaacagggattgcaaaataactcattataattcaatacattaaacaaccatcctccccgccttcgtgtcatattcccaatctgtgaaatgtgattgccagcacaattgatgatttttcaggtagcccatcactgggtttgtggcttaaggtatcaaataaataatcactatcgaatatatattcagtgattaaaaagcgataacgatatgtcacatcatggcctgcatagacgcatgcaatggccggagaccatctctgtttccgccgttccaggacaatgggtgaccgaggagagcatcatatgcaggcgacagccaaagagttcatcattgcgctggatgaaggcaccaccaacgcgaaagccgtggtgctggacagcaaaggcaaggttagcgtcaagttctcgcagccgctggcgatccaaaccccgcgcgaaggttgggtggaacaatccggcgaggcgctgatggcggcctcgctggcggtgatcgccaaagcggtggctcacgtcggcgcggaaaacgttgcggcgctggctatcagcaatcaacgcgaaaccgccatcggctggtatcgcgccagcggcgaacccattaacgccgccatcacctggcagtgcacccgcagcgccgcgttctgcgacacgctgcgtcgcgatcgtcaggagcagcgcattaaacacgccacgggcctgccgattgcgccgctgttttccgcctccaaaatgcgctggctgctggacgccactcccgatggctatcagcttgccgcacgcggcgagatttgcctcggcactatcgacagctggctgctgtggaatttaaccggcggacaatccttcttctgcgattattccaacgccgcccgcacccaattgctgaatctgcaccgcggcgagtgggatgaggagatgctgacgctgtttggtattccgcgcgcggcgctgccggagattaaaccgtcgagcgggctgttcggctacaccaaagggctggcggcgatccccgacggtatcccggtgatggcgatgattggcgactcccacgccgcgctattcggccacgcccttggcgaagctggctgtgtgaaagccacctacggtaccggctcctcggtgatggcgccggtcaaatcggcccagtgcgatattgccgccctggcgaccaccgtcgcctggcacgatggcgaccagttggtgtggggactggaaggcaacatcccccataccggcgatgcggtagcatggatggcggacagcaccgggctgagcgaactctccgcagccgacctggcccacgagctgaataccctgcccgcctccgtcgattcgaccttaggggtctacttcgtgccggcgctgaccgggctcggcgccccctggtgggatgacagcgcccgcggggtgatctgcggcctcagccgcggcgtcaagcgcgcgcacctgatccgcgcggcgctggaatccattacctatcaaatcgccgacgtggtggcggcgatgcgccagcacgctgaattcaccctgacggcgttaatggtcgacggcggcccaaccaacaacgactggctgatgcaataccaagccgacctgctcggctgcccggtgatgcgcagcgatatcccggagctatccgccatcggcgcggcgctactcgcccgcaaagccctcactccgggtgagaccgccgacctgcaagcctttttaaccgaacacagcgcttttcaacccgacatggcccgccaccagcgactacagcagcgctggcgggagtggcgccatgcggtaaacagaacattatggaaaccggattcgccagcctgatgcccatcggcgtcagattgagcgacgaaccttattaacccactacaggagaaccccggcccataacgatgtatcgcacccccgaatttattctggggaaatttcagaccgtaaaatcctgcccgctcaggggctcatttgttcgaatataaaaatataggaacagagtcatgaaattacgtttaactcttttaaccgctgcgaccctgactgccttttcctttgccgcgcatagcgccgaaaaaggcaccattatgataatggttaactcgctggataacccttattacgcctcggaagccaaaggcgccagcgaaaaagcgcaagccctcggctataaaacgaccgtgctctcgcatggcgaagatgtcaaaaagcaaaatgagctgattgataccgccattggtaaaaaggtgcaggggattattctcgataacgccgactccaccgccagcgtcgccgccattgaaaaagccaaaaaagcgggcattccggtggtattaattaaccgtgaaattccggttgatgatgtcgcgctggaacaaattacccataataacttccaggcaggttcagaagtcgccaacgtatttgttgagaaaatggcggaaaaaggcaaatacgccgaactgacctgcaacctcgccgataataactgcgtcacccgttctaaatccttccaccaggtgattgaccagtacccggatatggtcagcgtggcaaaacaggatgccaaaggcaccctgatcgacggcaaacgcataatggatagcattctccaggctcacccggatgtcaaaggggtgatctgcggtaacggcccggtggcccttggcgccatcgcggcgctaaaagcggccaatcgtaacgatgtgatcgtcgtcggtatcgacggtagcaacgacgaacgcgatgcggtgaaggccggtacgctacaggcgaccgtgatgctccaggcgcaggccatcgccgcccagggcgttaccgatctggataactacctgcaaaaaggcgagaagccggcgaagcagcgcgtgatgttccgcggcattctgattacccaggataacgcagataaagttcaggacttcaacatcaagtcctgagttcgggtggttgcgcccctgcgggggcgcagaggagagcattatgtacaagaaaacctgtctcgcgctggccgttctggcgcttggcggctgccgcatcgtctcgcagcaggaactggcagacctgaaatccccgcccaatccgcatatggcgaacatcgataaaacctggcagcagagcatcgtgccgcaggtggtcgccaacgcccgcccggcggcggagttgatgagcgcgctgaaggcgcaaaaagatatcgatagcgcctgcaaagcgctgggctaccgtgcccaggacgaaaacccgtgcatcttttacgttaaggtggcgggtgccgtcagcaagctggatagcgcctcgcgcagcggcaaaatgaccctcgccgatggcagcatcggtaatgtggtggtgcagattggccctaccctgcgcggcaccctgctgcgtgacggttatcgcgacgccagctaccaggactttaacgaccaggtgctgtttggcgaatacagcaaaaatattaatagtcaggcggtcaaaatgattcaggcggccaacctgaaaaccggcgacaacatagaagtgtatggcgtcttctcggcctgggatattccacaaactattccggaaatcaccccggcgaaaatcgttcatccgggaggtcaataatatgatgccgcaagatatcgtcgctccccaaccagtcgaatctgaagtgattatcgaaacccgcggcctttcgcgcatttatcccggcgtgaccgcgctggataacgtgaattaccgggtctatcgaaataaggttaacgttctgatcggagaaaatggtgcgggtaaatccaccatgatgaaaatgcttgccggcgttgaaacgccctcctccggtcaaattattctcgatggcgaggcggtgactttaaactctacccatcaggcagagaaactcggcatcagcattattttccaggaactgaatttattccccaatatgaatgtgatggacaacatattcatggctaatgaattctttcagaaaggacgcatcaacgagaaatatcaatatgcgttagctaaatcgctactggagcggctggagctcgacgtcgatccctacacacagctgggcgaactggggattggccatcagcagttggttgaaatcgcccgtgcgctatcaaaagacacccgcgtgctgattatggatgaacccacctcggcgctgagccagtccgaggtcaaagtgctgtttaaggtcatcgagcagcttaagcgccgcggcgtcaccattatctatatttcgcatcgcctcgaagagctgatggagattggcgacaacatcaccattttccgcgacggtcgctttatcagcgagcgcaacgtcagcgacgccagcgttccgtggatcatcgaacagatggtcggcgataagaaaaagcactttgattatcagcccgcgccaaaaggcaacgcggtgcttgacgtcaaggggctgaccgcgttgcatccgagcggcggctacaaactcaatgatgtcacctttaccctcagcaaaggcgaagtgatcggcatttacggcctgctgggcgccgggcgcaccgagctgtttaaagggctggttggcttgatgccctgccagaacggcgaggtacatcttaacggcgaaagcatcggcaaatctcgctttcaacaccgtctaaaaaaggggctggcgctggtgccggaagaccgtcagggcgaaggcgtggtgcagatgatgtcgattcaatccaacatgacgctctctgattttagcctgcagggttttcgccgcgcctggcggtggctgaatccgcagaaagaagagtcctgcgtaaaagagatgattcagcaattggctatcaaggtgagcgacgccaatttgcccatcacctcactgagcggtggcaatcaacaaaaagtggtgctgggtaaggcgctgatgacccagccgcaggtggtcttccttgacgaaccgacgcgcggtatcgacgtcggcgcgaaaaccgacgtctatcacctgatcggcaaaatggcccagcaggggctggcggttatgttctcctcttcggagctggatgaagtgatggcgctggccgaccgcatcctggtgatggccgatggccgcattaccgccgatttaccgcgccatgcggtgacccgcgaaaagttaatcgcggcttcaacacctcaagattaatcaggctggaatccatcatgaaccagaaatatatgatttatatgtacctgctgaaggccagaaccttcatcgccctgctgctggtgatcgcattcttcagcgtgatggtaccgaacttcctgaccgcctctaacctgctgatcatgacccagcacgtggcgattaccggcctgttggccatcggtatgacgctggtgatcctcaccggcggcattgacctgtccgtcggcgcggtggcgggtatctgcgggatggtcgcgggcgcgctgctgaccaacgggttgccgctatggaacggcgacatcatcttctttaacgtcccggaagtgatcctttgcgtcgcggtcttcggcgtgctggtggggctggttaacggcgcggtgattacccgcttcggcgttgcgccgtttatctgcaccttagggatgatgtacgtcgcccgcggctccgccctgctgtttaacaacggcagcacctacccgaacctcaacggcatggaagcgttgggcaataccggtttcgccacgctgggctccggtaccctgcttggagtttatctgccgatctggttgatgatcggcttcctggtactgggttactggctgaccaccaaaacgccgctcggtcgctacatctacgctatcggcggcaacgaatccgccgctcgcctcgccggcgtaccgatcgtcaaagccaaaattttcgtctacgccttctccggcctgtgcgccgccttcgtcggcttgatcgtcgcctcccagctacaaaccgcgcacccgatgaccggcaatatgtttgagatggacgccatcggcgccaccgtgctcggcggaaccgcgctggcaggaggccgcggccgggtgaccggctctattatcggcgccttcgtgatcgtcttccttgccgacggcatggtgatgatgggcgttagcgacttctggcagatggtcattaagggcctggtgatcgtcaccgccgttgtcgtcgaccagttccagcagaagctgcagaacaaagtcattctgatgcgccgccacgaagagaagctggccgccatcccgccgaacggcgccacctccagctaatcggcaaccgtatacacgtattccgccgggcctggcgcccggcttatcgaaagggaaaaaatatgcaacgagatttccataataaaacggtggttatcaccggcgcctgccgcggcatcggcgcaggtattgcggagcgctttgcccgcgacggcgctaatctggtgatggtctccaacgccgagcgcgttcacgagaccgccgaaaccctgcgtcagcgctatcaggcggatattttatcgctgcaggtcgatgtgaccgacgaagcccaggtacagtcgctgtatgagcaggccgccgcgcgcttcggcaccattgacgtctccattcagaacgccggggtgatcaccatcgattactacgatcggatgccaaaagccgattttgaaaaagtgctcgcggttaacaccaccggcgtgtggctgtgctgccgcgaggccgctaaatatatggtgaaacagaaccacggcagcctgattaacacctcttccggccaggggcgtcagggctttatctacacgccgcactacgccgccagcaaaatgggcgtgatcggtattacccaaagcctggcccacgaactggcgccgtggaacatcaccgtcaacgccttctgccccggcattattgaaagcgaaatgtggaattacaacgatcgcgtgtggggagaaattctcagcaccgagcaaaagcgttacggcaagggcgaactgatggcggaatgggtcgaagggatcccgatgaagcgcgccggtaagccggaagacgtagccgggctggtggccttcctcgcctccgacgatgcacgttacctcaccgggcagaccatcaatatcgatggcggtttgattatgtcgtaatccctgcagcccggataaggcgctacgcgccgccatccgggaaagcgggctcccgagattcggcaataccttgaagagagtgaacactatgatcggcaaagactttgcacagcagctgtttaacctgcaggagcgcgtcgctttcgtgaccggcgccggcagcggtatcggccaaaccatcgcctgcgcgctcgccagcgccggcgcgcgggtggtctgttttgatcttcgcgacgacggcgggctggcggaaacggtcagccatgttgaatccatcggcggccaggcctgttcttataccggcgatgtccgccagcttgccgacctgcgcgccgccgttgcgctggccaaaagccgttatggccgcctcgatatcgccgttaacgccgccggtatcgccaacgccaatccggccctggagatggaaagcgagcagtggcagcgggttatcgacatcaacctcaccggcgtatggaactcctgcaaagcagaagcggaattgatgcaggagtccggcggtgggtcgattatcaatatcgcctcgatgtcggggattattgttaaccgtggcctcgatcaggcgcattacaactgttcgaaagccggcgttattcatctgtcgaaaagcctggccatggagtgggttgataaagggatccgcgtcaacgccatcagccccggctataccgccacgccgatgaatacccgcccggagatggtgcatcagacccgcgagtttgaaagccagaccccgatgcagcgcatggcgaaggtagaagagatggccggcccggcgctgttcctcgccagcgacgccgcctcattctgcaccggcgtggatctggtggtcgacggtgggtttgtctgctggtaaaaccggtcttgccccggctaacgatgcataagccggggcgttttctttccgcacgcacctctcctggcgctattttcttaaaccatcttgcacatctatgcagagcacatgatggatcatgaagatggctcatgcagtattgaaattaactctctttcactcattcaatgactctggcaaaaatagtcttcagcaactgcagacaatatgaatgctactgaataataaatccagataaatcgcaaggtcattctgggaatgtgaaatacctgcatttttatatcagaacccagggtggaaagagacgatgacagactttacctttacgattaaacgtagtcgttttgatgaacactataacccggcggaaaatacgcgtattaccaccaattttgccaacctggcgcggggcgaaaaccgtcagcagaatctgcgcaatgcgctggcaatgattgataatcgctttaataacctggtgcagtgggacaacccgaacggcgaccgctactccgtcgagctcgatatcatctcggtcgaaatgaatattagcgataacggccagaatgcggcattcccggtgattgagattctgcaaaccaatattattgataaagccaccaacgcgcgaatcgaaggtattgttgggaataacttctcctcttatgtgcgcgattatgattttagcgtattactgccggaatataataaagataaagcaacattcagcgtgccggaaaattatggcgttctgcatggcaatattttcaaacatttcatacgctctgccgaataccatgaatgttttaaaaagtcgccggtcatctgcctgagcgtatccaataagcatacctaccgccggaccggcaatcagcaccctattctcggcgtcgagtaccagcaggatggcgtggcgctgaccgaggcctatttcaataagatgggcctgcaggtgcgttactttatgccggccaatagcgtagcgccgctggccttcttctgcgcgggcgatctgctcagcgattacagcaaccttgagcttgccagcactattagcacgatggagacgttccagaagatttatcgcccggaaatttataacgctaactccgcggccgggcagtgctatcagccgaacctgaataatcaggatcattcgttgacccggattgtttatgaccgcgaagagcgcagccgcctggcgattgaacagggcaaatttaccgaacaacagtttattaagccgtaccagcatattcttgagcaatggtcagctcattacgctctctaaatcataaaaaaataaggtcacctgtatgaaaacattgctcccgacatccaccgcaggcagtttaccgaaaccgacctggctggcgcagcccgagacgctgtggtcaccgtggaaattacagaatgaagagttagtattgggcaaacgcgatgcgctgcgtttatcgctcgacgatcagctgcgcgcaggcattgatatcgtcagcgatggcgagcagacgcgtcagcactttgtcaccacttttattgaacatctcagcggcgtcgattttgagaaacggcaaacggtgagaattcgcaaccgctatgacgccagcgtgccgaccgttgtcagcgccgtcgagcgccagcagccggtgtttgtggaagatgcgaaatacctgcgtcaactcaccaacaaaccgattaaatgggccctgcctgggccaatgacgatgatcgatacgctgtatgacaatcactataaaagccgtgaaaagctggcgtgggaatttgctaaaattctcaaccaggaagcccgggaattagaagccgccggggtagatattattcagttcgatgaacctgcgtttaacgtcttctttgatgaagtcaatgactgggggatcgccgcgctggaaagagccgttgaagggctgaaatgcgaaaccgccgtgcatatctgctatggctacggtattaaggccaataccgactggaaaaaaacgctcggctccgaatggcgccagtatgaagaggcgttcccgaaactccagacctcctctatcgatattatttcgctggagtgccacaactcgcgcgtaccgatggacctactggagcttatccgcggcaagaaagtgatggtcggagctatcgatgtggcgaccaacgccgttgagacgccagaagaggtggccagcacgctacgcaaagccctgcagttcgtcgacgccgacaagctctatccatcaaccaactgcggcatggcgccgttatcgcgtcaggtcgccagcggtaagctacatgcgctaagcgccggggcggatattattcgccgggagctggcggcgaaatagttatcggctatttattgtctctgatactacaacaggagccgggcctacctggctgctgttattccctccacaaaggttatcatctctgtcttaactcctgatgataataatctaactgactgaacttcggattagcccgatagtagatcacgggcacctcttttcccacataaaccttatcgagatccacagtattaatagtcataaactgattagctttgctataaattttacctccggcactaaagctatacgttaatacaatactcacctcgccacgatcgttcggtgctttaggataataagagacgatactggcgcgggtcgctacaggatcccttttgatcatccagtagtggaaaaaacctttggcaaaacagaagacaaccgcggccatcatcgcatagaatggcccccaaatgatgatccctgaatatttctccattatatttctcatgtaatgattgttattattaatagtgcggtttatacgaatttaaaacgtgatatcgttgtcgccccaggaaacaatcctggaggacccattatttcattccattatttgcaaataacgatatttaagcgtagatactcccccatgactatatgacaaccagtaataacacaaataaaaaaatttaattaagcacaaatagtacattaaatggttatttaataattaaagctgtaaaatgacaatgtattagattgcaaaaaaaagggcgtcatttattacatgacgccctggtaaaagcgggtttacattccagggaaggtgacgctgttccccggcgcttccctgtgtagatgaataaagttcaggtgtcgctcgtactggtcgagaatatcggtgatcacctgctctttgctgtaatccatcaggtcattgccctggctcccctccagcaggaaagtctcaagacggtagtaggtcgatttgccgctgcgcgcccggtaggtaaaaccaggaatcgagtactgctgcggccaaatctggtagacgaagttttgttcgtcgcccatatgcaccagcagatcgaggtgaccaaggttatcgccctcttccggcggcaggcttttcagctcaacgtaagcgccgcgcagcttcaactcctgcgccacttcttccatcgccgggaagcacaccgtctccatcatatggcgggtatagcgcgtgccgggatagttcattaagcgtgacaagcgctttttccagctcagacgatcctgcacgcccagcgggcgcggcgcagtgtcgcgattggcgctttcgcggcgataatcctccaccttcaatgacttatataaccccgccatcacgaagaaaatcacaaagctgaacggtagccccatgatcaccgtcgcgttctgtagcgcggagatgccgttagtcatcagcataccgagggtcaacaggccaatcaccaccgaccagaagatgcgcagccagttcggcgcatcgctattaatatccttcagcttcgaagtgaagttgccgagcaccagcgcgccggagtccgctgaggtgacgtaaaacagcaggccggtaatggtggcgaccgaggcgctaaaggtaaacgccggatactgcgccagcagattatagaaaccacgctccgggtgagcgatggcctcggcggcaaaatctgcattgccatgaataatttcatataacgcgctattgccgaataccgacagccacagcagggtgaaagtgaacggaataatcagcgtacccactacaaactggcgaatggtgcgcccgcgcgaaatacgcgccaggaacagaccgacaaacggcgaccacgccacccaccaggcccagaagaataacgtccagttattcatccattcaaccgggcggtcgaaggcgaagctgttcagcgtcattcccataaagcgattgacgtaatccccaacgttcaacaccagcgcattgagcaggaactcggtatcgcccataaacagaatgaataagatcagccccagcgccagcaccacgttgagctcggaaaggatacgaatgcccttatccacgccggaggtcaccgaaatggtggcgataatcaccgacaatacaatcagcgccgcctttgcccccaatgaatcaggaatatggaacagcacgctcaggccgtaattgagctgcaccacgccgataccaagggtagtggcgatgccgaaaatcgtaccgatcaccgcggcgatatcgacgctgtggccgatggggccattaatctttttcccgaagataggatagagcgcggagcgaatggtgagcggcaaattataacgatagctaaagtatcccagcgccattcccatcagggcgtacatcgaccagccggtgaggccgtagtggaatagcgtccataccatcgcctggcgcgccgcttccatggtctgccccgccccttccggcggctgcatatactgcgtgaccggttcggcgaccgagaagaacatcaggtcgataccgataccggcggcaaacagcatcgccgcccagctcagcacgctgaactccggcttcgagtgttccggccccagcttcaccgaaccaaagcgcgaacaggcaatacagacgacgaacacgatatacagcgtggcggcgagtaaataataccagccaaatgtcttagaaacccagttcagggtacggccaatccaggccgcggaaaaatcgctgaagaagatagtcatcagggaaaacaacaaaatcagtcctgcggaagtgtaaaaaaccaccggattgattttgtccttttctctgctcggcgaaaggtctgtcatccattctccttacatttattgcaactattaaaaagcaaatcggcaacaattaagacacattttatattgaacgtccaatcaaaaaccgctttaatagataaacaaatctgatgaatggagtccgggaaatgccaaaactggggatgcaatcgatacgtcagcggcagctgatcgacgccacgctggcggcgattaatgaggtcggcatgcatgacgccaccatcgcgcagatcgcccgccgggcgggcgtatcgacgggcatcatcagccactatttcaaggataaaaacggactgctggaagcgacgatgcgcgacatcaccggccagctacgccatgcggtgttacagcggctgcgggcgctacccggcgccagcgctgaacggcgcctgcgggccatcgtcgccggcaatttcgatgacagccagataagcggcgcggcgatgaaggcctggctcgccttctgggccagcagtatgcatcagccgatgctctatcgcctgcagcaggtcagcagtaaacgtttgttgtcgaacatcgtgtatgagtttcagcgtcagctaccccgcgagcaggcgcaggaagcaggttacggtctggcggcgctgatcgacggcctgtggctgcgggcggcgttaagcggtaaaccgctcgacaaaacgcgtgccgaaaccctcgccgaccatttcatcagtcagtatctgccaccgacttcgcaataatggaggaaaccatgtcccgaatggccgaacagcagctttatattcacggcaagtttgtcgccgccaccagcggtaaaactttcgagaccatcaaccctgccactggggaagtgctggcaaccgtccaggccgccgggcgtgaagacgtcgaccgtgcggtaaaaagcgcccaacaggggcaaaaagtctgggcggcgatgagcgcgatggcgcgctcgcggatcctgcgtaaagcggttgatattctgcgcgaacgtaacgatgagctggcgcgtctggagacgctcgataccggcaaaccgctgagcgaaaccgccgccgtcgatatcgtgaccggcgccgatgtactggagtactacgccggattgatcccggcgctggaaggcagccagatcccgctgcgcgacagttcttttgtctacacccgccgtgaaccgcttggcgtggtcgccggtatcggcgcctggaactacccgatccaaatagcgctgtggaaatcggccccggcgctggccgccggtaacgcgatgatctttaaaccgagcgaagtcactcccctcaccgcgctgaagctggcggaaatctaccgagaagcgggtctgccggaaggggtcttcaacgtcctgccggggatcggcgccgaaaccggccagtacctgaccgagcatccggatatcgccaaaatctccttcaccggcggtgtcgccagcggcaaaaaagtcatggccaactccgccgcctcttctttaaaagaggtgaccatggagctgggcggtaaatcaccgctgattatcgcggaagatgccaacctcgacctcgccgccgatatcgccatgatggccaatttctacagctccggtcaggtctgcaccaacggcacccgcgtgtttgtgcccgcgaagtttaaagccgaatttgaacacaagatcctggagcgcgtgggccgtatccgcgccggagacctgtttgccgatgataccaatttcggcccgctggtcagcttcccgcatcgccagaatgtcctgcgctatatcgagagcggcaaaagcgaaggcgctcgcctgctgtgcggcggcgatgtgctgaaaggcgaaggcttcgataatggcgcatgggtcgctccgacggtcttcaccgactgcaccgacgacatgactatcgtgcgcgaagagatcttcggaccggtgatgtcgattcttagctatgacgatgaagcggaagtgattcgccgcgctaacgccaccgagtacggccttgccgctggcgtggtcacgccggatttgaaccgcgctcaccgcatcatccaccagctggaagccggcatttgctggataaacagctggggagaatcgccggcggaaatgccggtcggcggctataaacactccggcattggccgagaaaacggcgtgatgacgctacagagctatacccaagtgaaatccatccaggttgagatgggtcagtttcaatccatattttaaccaggaggtcatttttgcagtttgactacatcattattggcgccggctccgccggcaacgtcctcgcgacgcgtttaacggaagatcccaacaccaccgtcctgctgctggaagcgggcggcccggattatcgctttgatttccgcacccagatgcccgccgcgctggctttcccgctgcagggcaaacgctacaactgggcctatgagaccgaaccggaaccctatatgaacaaccgccgcatggagtgcggacgcggtaaagggctcggcggctcctcgctgattaacggcatgtgttatatccgcggcaacgccatggaccttgataactgggccgccgcgccggggctggaacactggagctacctcgactgcctgccctattaccggaaagcggaaacccgcgacatcggccctaacgactatcacggcggcgacggcccggtgagcgtcgctacgccgaaacagaataataacccgctgtttcatgcaatggtggaagccggcgtgcaggcgggctatccgcgtactgacgatctcaacggttatcagcaggaagggtttggcccgatggaccgcaccgtgacgccgcagggacgccgtgccagcaccgcccgcggctatctcgatcaggcccgcagccgcgcgaacctgaccatccgcacccatgccatgaccgatcacattatttttgacggcaaacgcgccgttggcgtcgagtggctggaaggcgacagcagcgcgccgtcgaaagcaatggccaataaagaagtgctgctctgcgccggcgccatcgcctcgccgcaaattttgcagcgttccggggtcggcaatccggaactcctgcgccagtttgatattccgctggtccacgccctgcccggcgtcggtgaaaatctgcaggaccatcttgagatgtacctgcagtacgagtgcaaagagccggtatcgctgtacccggcgctacaatggtggaatcagccgaaaatcggcgcggaatggctgttcggcggcaccgggatcggcgccagcaaccagtttgaagcgggcggatttatccgcagccgcgaggaattcgcctggccgaatattcagtaccacttcctgccggtggcgattaactacaatggatccaatgcggttaaagagcatggtttccagtgccacgttggctcgatgcgttcaccaagccgcggtcacgtgcgtctgaaatcgcgcgacccgcatgcccatccggcaatcctgttcaactatatgtcgagcgaccaggactggcaggaattccgcgacgccatccgtattacccgcgaaatcatgaaccagccggcgctggataaatatcgcgggcgcgaaatcagccctggcgttgagtgccagagcgatgcggagttagatgagtttgtgcgtaatcacgccgagaccgcgttccacccgtgcggcacctgtaagatggggtacgacgacatggcggtggtcgacggagaaggccgcgtccacggcatggaaggattgagagtcgtcgacgcgtcgattatgccgcagattattaccggcaacctgaacgccaccactatcatgattggcgagaagatggccgatgccattcgcgggcgtcagccgttaccgcgcagcaccgcggcctactatgtcgccggcgacgcgccggttcgccgctaaacgtgcaggtccccggattgcgctacgctaatccgggctaccaaatcgcacaactctgtagccccggtaagcgacagcgccaccggggattttgaagccaccagcaccggtgtcagcgatacaccacccggcctcccggattgcgctacgctaatccgggctaccaaatcgcacaactctgtagccccggtaagcgacagcgccaccggggattttgaagccgccagcaccggtgtcagcgatacgccacccgccttcccggattgcgctgcgctcatccgggctaccaaatcgcacagcgctgtagccccggtaagcgacagcgccaccggggattttgaagccacctgcaccggtgtcagcgatacgccacccggcctcccggattgcgctgcgctcatccgggctaccaaatcgcacagcgctgtagccccggtaagcgacagcgccaccggggattttgaagccaccagcaccggtgtcagcgatacgccacccggcctcccggattgcgctacgctaatccgggctaccaaatagcacaactctgtagccccggtaagcggcagcgccaccggggttttctcatcccgtccgcactcactgcgcttctcctatacttgcagtttaagcggggacaggagaaagacgatgacgctacccgattttcacgtttcagcgccttttacgcttggtattgagctggagttacaggtcgtcaacccgccgggatacgacctcagccaggatgcctccacgctgattgccgatgtgcaaagtgaactaacgacgggagaggctaaacacgacatcaccgaaagcatgctggagatagccaccggcatctgtcgcgatattagccacgccaccgcacagctcggcgccatccatcaggcggtacagcgcgccgctctccgtcaccatctgcagatctgcggaggcggatcgcaccctttccacgcctggcagcgccagcaaatcagcgataatccgcgctatgtgaaaaccgtcgagcacttcggctatctggcaaagcaggcgacggtatttggccagcacgttcacgtcggctgtcaaagcggcgatgacgccatctatttgcttcacgggctgtcacgctttgtaccgcactttattgccctcaacgccgcctcgccgtggttcgacagcaccgacagccgctttgcctgttcgcgtctgaatcgtttctcttcctatcctgataacgggccgatgccgtgggttgagaactggcaggcctttcagcgtttattccgccgcctgagctacaccagcatgatcgacagcatgaaggatctgcactgggatattcgcccgagcccggttttcggtaccgtcgaggtgcgggtgatggatacgccgctgacgataggccaggcggtgaatatcgccggatttatccagacgctagcctgttggctgttaagcgaacggccgtttaaacatcagccggaggattacctcctctaccctttcaaccgctatcaggcctgtcgttacggcctcgacggggtgataaccgatgtctggtccggcgaacaacaaagcatccgcgcgaacattctacagttagccgacagactggcgccctttgcccataaggtgcacgccagcgcggcgctggaatcggttgtgcgccaggccaggtccaccatcagcgaagcgcagcagatgcgcgaattcatcgccaacggcggttcgctgatcggcctggtacaaaagcattgcgagatttgggcggcataaggaagcgaaacgggtatactcggcgcaggatattcaaaaggattgttcatgttattacgccgcctgctccctcttgcgcttcttcccttcaccgcctttacccatgctgcctgtacgctcaccgacccaacgctgaccttgcaaagctatacggttaatccgcagcaagagcgcatcgtgatgtactggcaaaagcaaaatggcaaagcctggggatcgctacgctcgctgcttgcggatatcaataaagacgaccgcgtccagatggcgatgaacggcgggatatacgataaggcctacgaaccgctgggcttgtatatcgaaaatggcgagcagataaagcccctcaaccgcgcctccggcggcggcaactttttcattcgccccggcggcgtattctggctgaagggccagcgggcgggaataacgcctatcaataaatttaagccatcgcctgagataacctacgccgtgcagtccgggccaatgctgattgaaaacggcgccatcaactggcggctgaagccctccgccagctcgcgcaaactgcgcaacggcgtcggcattgataagcagggacgggtggtatttatgcttagcgagcgcgaaaccaatttctacgatttcgcctgttacgcacagtccaaactccacgtgcgccagatgctctacctcgacggtacgatttcaaaaatgtatcaaaagggcggcagcataccgtggcaataccatccgttcgtcaccatgatcgcggtggaaacccaaaaacctggctaaacgaaaatggcgcccgctctatactgaaggggcgccattcggtatcaggtaggtttacgcaaacggcgggttagccgcttctcgacttcgaccaccaggaacatggccacgccaatcgccagggtcacgaaccagtagcgcagcggtagtgcttcggtgccgaacatgttctgcatcagcggcacatagatgatgaccagctgcatcagcaacaagacgccggtcaccagccagatacctttgttgcgcagcaaccctttgttcagggagaaactgtcgctgctgcggcagttaatcatatagacccactgcgcggtcaccagcatctgcagcagcacggtgcggatgaactcggcgctgtggccgcgcggcgccagccaggcttcgagaataaaagcggcgacggcaatcatcgaaccgacaaaagcgacgcgccagacggcgaacccatccatcacgtgctggccggtctttcgcggcggacggttcatcacgttgcgctcggcggcttcaaaggccaggccgaaggagagcgtggccgaggtcgccatgttcatccacaaaatcagcaccggcgtcagcggaataatattgcccgccagcagcgcaatgatgatcaacagtccctgcgcgaggttggtcggcatgatgaacaggatagtctttttcagattgtcgtagacgcggcgtccctccttcaccgagctggcgatggtggcgaagttgtcgtcggtaagcaccatatcggcggcctctttggtcacctcggttcctttaatgcccatggcgatgcccacgtcggcctgacgcagcgccggggcgtcgttaacgccgtcaccggtcatcccgaccacttcgccgctatcctgcagcgccttgaccagacgcagtttatgctccggactggtacgggcgaaaatatcaaactccactgccgccttcgccagctcggcatcatccatatgctcaagttgatagccggtcatcgcctggcggctgttggcgatccccagcatctgaccgatgctcatcgccgtttgcgggtggtcgccggtgatcatcttcacgcggatcccggcggtctggcaggcgtggatcgcgtcaatcgcctccggacgcggcggatccatcattccggcaatgccgaggaacaccagcccctccctcagatcatcgtgggtcaatgtggcgctgccgacggttgccggtttacaggcggcggcaaccatccgtaacccctggcgggcaaagcgcgccatttcgtcttcccaatactgacggtcaaacggccttggcccctgcttgctcatctgctggccgcacagggcaaagatgacatccggcgcgccggtgagcagcacccgctcctcatcgccgatctgctgacgggtggccatatatttgtactgcgagtcgaagggtattttcgccaccaaccgggtggcgaccggcgctaactgggctttcgccgccagcaccttcagcgccccttcggtcgggccgccggtgatcccccacaggccacgctcgtcctgaacgatctggctgtcgttgcacagatcgatggtacggaggtaggtttccaaaacgctgcccggctggaccaccaccggctcgtcgctgccctcctggaaaatgcgcccttgcggctcatagctgtcgccttcaacacggtagcagcagtcggcggtgatgactgctttcaccgtcatttcgttcatggtcagggtgccggtcttgtccgaacacaccacggtcatcgcgccaagcgtttcaaccgtcggcagcttgcggataatcgcccgcttgcgcgccatcgcctgtacgccgagcgacaggataatcgagataatcgccggcaggccttccggtaccgccgccaccgcgaggctaatcagagacagcagcagctcgcccagcgggatatcgcgcagcgcgaggctgaagaagaacagcgccaccatcattgcgaggatgatgacaaaaatcgctttccccagcttatccatctgcaccagcagcggagtacggtgcttttcaatagccgccatcatctgattgatgtggcctagctcggtctcttgaccggtagcggtgaccacaccgacgccgctgccggcgctgatagtggtgccggagaagaccatattggtgcggtcacccagcggtagctcgccgtgcaacgccacagtggttttatccaccaccgttgattcgccggtgagaatcgcctcttcgacccgtagattgtggctttcaatcaggcgcatatccgccgggacgcgatcgccagcgcgcaaaataacaatatcgcccggcaccaggtcacgggtggggatggtttcatgcttgccgttgcgctggacgcgggcgtcgctggagagcatgttgcggatcccctgcagcgatttttcggcattgctctcctgaatatgaccgatcaacgcattaatgacggtaacgccgagaataaccagggtatcgacccagtggcccatcaccgcggtgagcgcggcagcggccagcaggacgtaaatcaggacatcgttgaagtgggcaagaaaacgcagccaggccggtttgcctttcttttgcggcagcgcgttagggccgtatgatttcaggcgcccgacggcttcagcggtgctgagaccgtcggcatggctctttttttgcgccagtaccgcttcgactgtttgctgataagcctgctgtggcgcgctgtcgcccgaaggcgtgatgttatgggggttaatcatccgggtcaaaattaagtttccttttaaattccgtcattcggaaagcctgaaatcatttctggccaatgaattaatgcgttttgcgagcaagatcaaattatccagccagaatatttatttactcgcaaattaaaaaatacatggtaagttggttctgaaaaacaaatattacagggtatttctaaaccatttataaacgaggtgaaacatgtttggaatctaccgcggacgccggctggtgctgtatgtcgcactggcaattattatcgccacaatagtgggatatagtacctatacttttgtaaaaatgctgggataataaatgacgttaatttacatcacggtgcaattaacttaatcacaaatattaatcaataaattaacagaggggttttaattaatagtattagaaataatatgaataacgtaaattaataagcggataaagcatattgcgttaacggactttttaccagacaatatgttttttaactgacgattaacattataatgaaacacccgctggaaacgctgttatccgccgccggcattttgctgttagccctgatctcatgcttattgctgccggcgccctcgctcggcctgacgctggcgcaaaaactggtcacatccttccacctgatggatctcaaccagctctataccttgatcttctgcctgtggttcttagcgctgggggtagttgagtatctggtattgcgctggatatggcgccgctggttctcgctggcagattaagccgtacgagagcaaaaaaagcccgccgatagaggcggactggtatgcagtcggcgctcagtgcgcacggctgtggttctctttgcgatacgcgcccggcggctgattgaaggtacgggtaaaaatacgggtaaaggtctgctgcgaatcaaagccgtatttcaggcagatatcataaacccgctgatcggtatcgcgcaggtcgcgcgctgccagcagcagtttacgctcgcgaatgtagcgcccgagactttcccctttatactgcaaaaacagccgttgcagatgccatttcgagtatccggcatggcgcgcaatatcatcaattcgcagtggctgatgtagattgtcatcaatccattccacgatagtgtcaatcacctgagcggatatattcatatctcttcttctgaaccactctggcggttagcgccaccaggcgttaaatgattgtgtcttatcagcgacccacaccggttcgcccagcattggcgtgactaaacgccactcacgtccttcgctggctgccgccagccgctggtacggatcgtcccagctgtgttttgccagcacaaagcgtccggcgtgccccggtaataccgaccgggcgcgtaaatcatcggcggcctgcgccgtttcttccggcatcatgtggatgtacttccagtcctggtcatattgaccgttttccatgattgccagatcgatagggccaaactgttcgccaatggccttaaaatgcgggccatagccgctatcgccgctgtaataaatcttttcctgcggagtgacgaacaggaagctggcccataaggtctggttgcgtttcagcccacggccggagaaatggcgagccggcagcgcatgtacggtgagttcatcgctgatttttatcgtctggttccagtccacttcatcaataatcgccgcatccattccccagtagcgcagatgcgagccgacgccgagcggcgtcaccacgcgtttaactttcggcatcagcgccttaatggtggcgtagtcgagatggtcgtagtgatcgtgggagataatcagcagatcgatctccggcatccgctgcgcgttccacgggtaatcaccggggaaagccttattgatgaaagagaacggcgcggcgtaatcgctaaataccgggtcgatcaggatacgtttacccgccagctgcagataccacgatgagtgaccgagccagaccatgacgtcttcaccagacggcaaaccggcaagatcggtattcaccagcggcaacggctgctgcgggcgcgcgttttctcgcttcgtgaccagaaaatcccaccacgcggccagcatgtttttctggccggtgaatcccggcgtcggcagttggttatggaactggccgtcacggtagttcggcgactgttcgacaagactgagctgcgcaccctgcggcgctttgccaaaaccggcattaagaacaaacggcaatgtcgttgctgctgctaataacataatggcgaccacgctaaaggtgacacggttcatatcctgaccagacaaaagccccatccaggggactttatgatataacttgattatgagtgagtaagcactcattattaggaaggagtagaaaatcgtcaagactattttcaatttttgacatctggcgttgcagttgtgcggtccgccgtgattagatcgaggtttaactttcagcgaggtaaaatgtagtggctcgtcctaagagtgaagataaaaaacaagcgttactggaagccgccacggccgctttcgcccagtccggcattgccgcttcaacatcggcgatagcccgcagcgcgggggttgccgagggaacgctgtttcgctatttcgccactaaagatgagttgctcaacgagttatacctcgccattaagatgcgcttagtacagacgatgatcgacgggctcaatcctgacgaaaaacgcccaaaagaaaacgcgcggaacatctggaacagttatatcgactgggggatgcgtaactctatggaataccgcgccattcgccgtatggcattgagcgaacgcattaccgatgaaacccgtagccaggtcaaagagagttttcccgagctgaacgagatgtgccagctgtcggtgaaagcggttttccttagcgacgcctatcgcgctttcggcgatgccctgttcctgtcgctggccgaaaccaccatcgaattcgccagccacgatccgcagcgcgcccgcgagatcattgccctcggttttgaggccatgtgggaatgcgctgcatgagagtgagtcgtaatggataacgaagcgctacaccatcacgcgcagcgtatcgcgctgacctacccttttaccgaacactgctggccgtttggcccggagtatgacgtgtttaaagtcggtgggcgtattttcatgttgaccatgacccttcgcgggcgtgccatagtcaacctgaaggccgatccgcaaaaatcgctgctcaatcagcaaatttaccgcagcatcgaaccgggctatcacatgaacaaaaagcactggatcaccgtggtcccgggcgaggatatcagcgaggatttacttgccgagcttattgacgactcgtggaatctggtggtggataagctggcgaaaaaagaccagcgtcggctgcgtcccggctgattttcaaataaatgcgataagtgttatcgcatttttcactcttatcatttcccgcgcatcgctgtactcttcctcccacgaaatgtgcccgtaaggggctgaaaattgtgaggaagagtcatggatattatctcagttgccttaaaacgttactccactaaggctttcgatccggcgaaaaaactgacggctgaacaggcggaaaacctgaaaacgctgctgcaatatagcccgtcgagcaccaactcccagccatggcactttatcgtcgccagcagcgatgaaggtaaagcccgcgtcgcgaaagcagccagcggcacctatgtgttcaacgaacgtaaaatcctcgacgcttcccacgttgtcgtgttctgtgcgaaaaccgcaatggacgatgcgtggctggaaaaagtcgttgatcaggaagatgccgatggccgttttgccactccggaagccaaagccggtaaccacaaaggccgcaccttctttgccgatatgcaccgcaaagagctgaaagatgacgatcagtggatggcgaagcaggtttatcttaacgtgggcaacttcctgctcggcgtggcggcaatgggtctggatgcggtgccgatcgaaggcgtcgatttcgctatcctcgacgaagaatttggcctgaaagcgcaaggttataccagcgtggtcgtggtgccggtcggtcatcacagcgtggaagacttcaacgccgcgctgccgaaatcccgcctgccgcagtccaccaccatcaccgagatctaatctccgcgcgctgccctccccggatggcggcgctttgcgccttatccgggctacctccgttacaaccgcatcaatgctgactgaaactgctggtgttggtggcctcaaaatcgctgagacgttcccggaaggccggggcagcccgcatggatgcgggctgagggccgtgatttgcaaggacgctgcctcggcccgacccgaagcctgcagggataagtcgaaggtaccacgaagtggcgattttggcggccagagcccgggagtacagagggcggcagcgactggccgccctctgtgcgctccctgcaccatgagagacataacgcagaagaattatcgggagcgcaatgtgctcggaaacagcgcagaacaaccgtttttctaggagcgaagcaatcgaaaaccgataacaagggctacggtccagtactcggttggtagccctggtaagcgttagcgccaccggggagggttactttttctccccctcgccggcgtgccagatccgctcggcgtaacggccaatcatcgccagcgataccgccaggatcaggaaaaacaccaccttgtgcaggctgtaccagaagaattcgaagaagcgggtgtagaggttgatggcaagaaacgtcaggccaaatccacgcagcatgccatcgtcggttttcaggctgatataaatacagatcgccgccgccagcgcaaacagcagcccccacggcagcagttgcgcctggctcaccccataccagctatcggaatcgtagttgccgaatatcgacaggatccacagcgcgacaaacagccaggtcagccccatcgccttactaacggtaaacaactgccgctggcgtaatacattttgcatcaagtagcacagcgccagcagcacgccgccgaacagcacgaaacgaatcgggaagctcatccccagccagtaggcgccccaacctgatatatagccggtttccgcgccaaaccagttacctaacgccagcaggaagaacagccacaccagcccggagcgggcgaaaaaccctatcaggccgtaaatggcgcagccgagcaggattagcggcgccacatggccgctgccgtcgtccagccgatcgcctagctgccacaaggcaatggcggtacagacgacgccgaggaacaaaatcgcctcggtgctgtagtgccactgggattcgcgccgctggcggcggaacccccaatagtaaaatgcgatggccagcagcgtcggcagaataatccgcgcgacagcggaatcgctgaacagattgataatcgccgcaatcaattcagcgtcggcgaacagactccccagcgcaatcaagacgcaggctatcgcggtccagaaggcatagcggctcaggcgctgccagtcgaaagtacggacagatagcgacgctgacagccgttggccatcactgctgttcaggaccccctcctgctgccattgctcaatagcgcgttgaagaatccgctgctgcttgcgggtgacgttcataagcgttccttgtccattgcgggcttagccctgttgatccaaccaggccagcgcctgttctccggtttcatccagcggtaaatagaccagcagacgcgaaccgttgcgcggcgcggaataccagtacatttgctgcaggctaaagcgcccgagctgcggatggttaaaatttttcacctggttttcgacgccgcgcacctcatagcgctggtgccatagcgcttcgaactccgctgaagcggcgaaaaagcgcgccagcttatcttcccactctggagaaccgcgatgctcagccatcgccgcgcgaaaataggaaacaaaagtcggcaacacatcgcgattttcaatgcggctacgccaggcttcgcaggtgagatagagatagatgcaattgcggtcttcttcggcaatcgtcgcgaaatcaacgcccatcaggcggcaaaagctgtcattccaggcgacgatatcaaagttcggtttctgaatgctggcgggctgcggcatcaggctatcaagcatgcgtcgggttccgggactgatcccctcgcaaaccgtggcctgcgtattctccggcggcgttaagccggccagtacgaacagatggcgggtttccagcgggctgcactgcagcgcgctggccacgccgcttaataccgccgccgacggattcacttcccgcccctgctcaagccaggtgtaccaggtcacgccgacgtccgccagcatcgccacctcttcccggcgcagccccggcgtccgccgccgcccgacgcgcggcaggccgagacgctgcgggtcaaggctttcgcggcgggcgcgcagaaatgctcccagctgtttacggctatcatcgggcgcgagattcagcgcctcacgttgcagcattagcgtcattgttcctccagcatggtagtaccaataccagtatagacaggaactggtacccgtttaattaatcggagatgctacggccatccgctgaatgacgcaatggagagatccgatgaattcgtctgctgtttcacccggccgcgccggcttactgctgttactgaccggccagatgctgccgttaattgatacctcgataaccaacgtggcgctggactcgatcacccactccctcgacgccagcgccactcaactggagcttatcgtcgcgctgtacggcgtggcctttgccgtctgcctggcgatgggcagcaaactgggcgataactatggacgccgccgcctgtttctgtggggggtggcggtattcggcatcgcctcgctgctatgcgggatggctaactccattaacgccctactcgccgcacgaacgctgcagggcgccggcgcggcgctgatcgtgccgcaaatcctcgccaccctgcacgtcaccctgaaaggcaccgctcacgcccgggcgatcagcctgtacggcggcatcggcggcatcgcgtttatcgtcggccagatgggcggcggctggctggtctccgccgatatcgccgggctcggctggcgcaacgccttctttatcaacgtgcctatctgcctgctggtgttggcctttagccgccgctatgtgccggaaacccgccgcgaaagccattccagcatcgactggcagggaactttcagcctggcgttaatcctttgcagcctgctgtttccgatggcgctggggccggaactgcactggccatgggagctacagctgcttttgctggccgtactccccctgctcggctggatgcgcctgagcgcgctgcgtaagcagcagcgcggcgagcaaccgctgctgccgccgcggctgttgaagctcaccagcatccgttttggtatggctatcgcgctgctgttcttcagcgcctggtccggctttatgttttgtatggcgctgaccatgcaggccgggctggggatggcgccgtggcagtccggcaacagttttatcgctctcggggtggcctattttatctccgcgctgtacgcgccaaagcttatcgctcgctacagcatgggacggattttgctgattggcctggcggtgcagattagcggcctgctgctgctaagcctcaccttttatcaacttggcctgcggaccacgacgctggcgctggtgcccgccaccgcgctgatcggctatggtcaggcgttaatcgtcaacagtttctatcgtatcgggatgcgggacattcgcgcctgcgacgccggagccggtagcgccatcctcagcaccttgcagcaggcgacgctggggctggggccggccattcttggctcgctgttcttgaccctggcccagcgcggcggcggtgactatacgcaggcgctgatcgtcttcctgctggtcgaggtggcaatgatgctgctgctgggcgctattgccctttggctgcgccatcacctgaacctgcagccggcggcgacggcgtcctgattcacaactgtgtaacctctgatttgcataatagtcatccagcggtcatcataaccgctggatgtacaggagacgttatgcaggaattaatatcgcaaatcgccgcattaggcatcaaaatcacccctaccacctcgctcatcattacctttggcattatttttctgacggcgattgtcgttcatctcattctgcacaaagtggtactgcgcaccttcgaaaagcgggcgcaggccagcagccatttatggctgcaaatcatcacgcaaaataaactctttcaccgcctggcgttcaccctacagggaattatcgtcaacgttcaggccgtgctctggctgcagaaaggcagcgaagcggcggaaatcttatctacctgcgcgcaattgtgggtcatggtttacgccatgctctctttcttctcgctgctggacgtgattttcaacctggcgcaaaaattccccactgcctcgcagctgccgcttaaaggtatcttccaggggattaagctggtcacggcaattattatcggcatcctgatcatatcgctgctgattggacaatcgccggcgattctgattagcggtcttggcgcgatggccgccgtgctgatgttagtatttaaagacccgattcttggcctggtggccgggatccagctttccgccaacgacatgctcaaactcggcgactggctggagatgccgaaatatggcgccgatggcgcggttattgatatcggtctgacgacggtaaaagtgcgcaactgggataacaccatcactacaatccccacctggtcgctggtctcggattcgtttaaaaactggagcgggatgtcggcctccggcggtcgtcgcattaagcgcagcctgaacatcgataccaccagcatccattttcttgacgagcaggagcagcagcggctgattcaggccaaattgctgaagccctatatggactcgcgccatcaggaaattaacgagtggaaccaacagcacgctaatgaaccgtcggtgcttaacctgcgcaaaatgaccaatatcggcaccttccgcgcctatctgcaggagtatctgcgtaaccatccgcggctacgtaaggatatgaccatgatggtgcgccagctggcgccggacgctaacggcctgccgattgagatctactgcttcaccaataccgtggtgtgggcggagtatgaaggcattcaggcggatatcttcgaccatatctttgcggtggttgacgagttcggcctgcgtattcaccagacgccaaccggcaacgacattcgttcactgtcgggcgcgctgtcgtcatagcatttgtaatgtcgccccgccattccgcggggcgataagccttacgccgggcggcgcagcagtttgaaagcggcaaacaggaagataatccacaccggcagcagtattgccgacagacgcatcccgtcaatggtgcacatcagcaccagaatcaaaccgagaaaggcgatacagaagtagttgctggctggcgccagtaacgctttgaacttcgattcacgccccttacgacgctgcgcggcgcgaaacttcaggtgcgccatacagatcatgatccagttcagcagcaacgtcgccaccaccagcgccatcagcagccccagcgcttcatgcggcagcagatagttgagcaccaccaccagcgaggtaatgacgcctgacagcagcaacgaattcaccggcacgccgcgtttgctgacgcgggcgagaaacttcggcgcattgccctgtaccgacaggccgaacagcatccggctgttggaatagacgccgctgttatagaccgacagcgatgccaccagaatgacgaagttcagcgcggaggccaccacgttgctgtcaagattatggaaaatcatcacaaacgggctgctatcggatttaatctctacccacggatagagcgccagcagcaccaccagtgaaccgatgtaaaacagcaggatacggtaaaccacctggttaaccgctttcggaatgctcttttccggattttgcgcttccgcagcggtgatgccgataagctccaggccgccgaaagaaaacataatcaccgcaagcgacagcaccaggccatgccagccagtggcgaggaaaccgccatgcttccacaggttatcaaaaccggctttgctaccgccgtggccgccaaacagcatccacaggccaaaggcgatcatgccgataatcgccagcacttttatcagcgcgaaccagaactccgcctcgccgtacaggcgtacgttgaccaggttgacggcgttaataatgatgaagaaagccgccgcccaaacccaggtgggaacatcggggagccagtactgcatataaatcccggcggcagtcagttccgccattcctaccagcacgaacatcacccagtagttccagccggacaggaaaccggcgaacgggccccagtatttataggcaaagtgggcaaaagaaccggataccggctcttccaccaccatctcgccaagctggcgcataatcagaaaagcgacaataccggccacggcgtaacccagcaacaccgccgggccagccatttgaatcgcgggaccaatgccaagaaacaggccggtcccaatcgcgccgccaagggcgataagttgaatatgtcggttctgtaaaccgcgatgaagcgtcgggccgctctcttctacggcatccgacgacgttgacgcgtctttcacgtcgttcccctgtgtgtttttgtgaaggggcaccttttatcacttaggggggattgtcgcaagttgcgcggggcaagcatcagccgcccgccccgcttttttagcgttagaagtcgtagctcattgagacgcgaacggtacgcggatcgccttcgaacagataggttccggtatcgtcaatgccggaccagtacttctcgttggtcacgttggtcaccccgatgcgccaggtcatttcgttctggtcggcgttcaggcgcgcaggcctaaatccagggtggtgtagctatccagcttcttggtgttggccgcatcggcatactgcgagccgctatgattgacacgcgctgtcgcggtcaggccttccaccggcttaatatcatactcggcgccgagcaccgcgtagaaattagccaccccgatggcatctttaccatcggttgcgcctttagcggttttagtctgtttggcatccagccacaccgtactggcgttaagacgcagccccagcatcggctcgccgaagacattcatctctacgccgcggttacgctgctcgccgtcgaggccataattgccagcggtatcggaaatggcgttcggttttttgatttcaaacagcgccagcgatccgccgatcgttccgtagtcgatcttgacgcccacttcgtcctgcttcgagtgcgcgatcccggtactctgcccggcattggccgccgtagtcggcgccacagagcccggctgcagcgcttcagtatggttagcatacagcgacagctgctcccacggcttgtacaccaggccaaacgtcggcatccagcggctttgggtataacgcgaagaggtatcttccagtccggtggcgttgctgtagttgcgcacgaccactttctgatgacgagcagccgcggtaaacagcaccttatcgttaaagaagccgagagtgtcgctcagcagccagccctgcgtacggctgcgcgaggtgaccagcggatcgtggtagttgccgccaaaataggcgttatccggcattgccacatcgcggttgtcatagatattggtggtcggattcttcgccgacatccgccaggcggtcgcatcggtatgcacctgcgccgcatagccgagattcaccttatgcgaaatcgcaccggtattgaaatcgccgcgtaccccgcccatgccgctgatcgcgtcgatgatgcggttagtatcaaggcggccaaccgttgcatcgccgtttttattgagcagcttcggcgcgctgtaggtgccgatttcatgcgaatgctgaccgccgagggcgctgtataccgtccagctatcgctcaggtcatattccgccttcgccatgccgaactcgctttcaatatcgctatagccccacttctggctgtagtttttgctgttgtccggcagcgccgggatgaaatctacaccgctgatattgacgcccatcgtaccgccgtggaacgttttcttctgatagccgaaatcgagcgaggagcggaaacgatcgccacggtaatcaagccccagcgaagccagcgtggtacggcttttatcgttatcgatagcgccttcgccctcgcgatgcaccaggttgacccgggcgccgaactggttgttatcgccgaaacggcgtcccaggtcgagggtaccgccaacctgcgaatcagaggtatagtcgacgccaacacgtgcggtcggcagatcttccgcccgtttcggctcgaggttaatcatcccgccgacgccgctgctggccgcgccgttaagcaggctgttagcccctttgaaaatttcaacgcgctccagcatctgagtgtccatcacctgacgcggcaccacgcccgccagaccgcccatggtcatgtcatcgccatcgagcttaaacccgcggattcgataggtctcggcgaagttgccgtagccctgtacggcctgcacgcctgcgtcgttgctgacgacatcggcgatagttttcgcctgctggtcctgaatcagcttcgaggtatagccgatgacgttaaacgggacgtccatcgccttttgttcgccaagcatccccagacgaccgccgtgggcgatctgcccgtcgaggaatgccggaaccaccaggtcgccgccggatttaaaatcgctggtttcgttagcctcgacgatgagggtctcttcgccaggttgcttcgcggcggcagcgtcagcggccatcgccgtttgactggcggcgccgatggctaaggccaacagcgttttacgcagcgggaaggatgaatagtgcgtggtgtgcataatttgccccatggatgaggataaatggatcaaagggcccgtcgccgggccagttatttttattgctcgttcaggtcgatgcgtacgacgctgtccgggcctttagtggagtggtctttattgaagggctgtttgacggtgacaaacagcgtctgaccatcggcggaaagcagcaggctgttgggattggccggcagcgcccagcttttcttcagcgtgtagcggctgtcgtcaaggctgataaccttgccggattcacgctgtgaaatataaatttcgtggcgtttcccattgaactgcaccgccagcgaatcgccgacctcgagctgtttaagcagtttgccactgtggatatccagcaccagggtggttttcgctttcgagttatcggtcacgaacagacgaccggtgtcgctatcttcggccatattaagcagcagcgccggcttgtcgcccagcggcttccagcgctgttcaatgcgttggttacgcgggttgatcaccagaatttcaccgctgccgttggcggcgtatacgcgcccggtttgtgcagaatagtgcaggccggtcatccatttaccggtgtttttaatccgcgttttcagcttcatggtagtggcgtcaaccacccagatttgcgccgggtcggcgaccgcgccaacgtagagggtattatttaacagcagcagctgacgcgccccataggggagccctttttcattgcgctcgctgaacagcaggcggttttttaccttgccggtggcggtgtcgatagcgctgatgccgccgtcaagcgaattgctgacgtatagcgttttaccatccgcagagagctgcaaagcgaagtttttcagatcggtatgcgtcaggccgatggtattaagggtttgcggatccagcttgtaaaccgccccgccctgcacatctttaaagccttcggcgctggcgacgtacagcgaatcgccctgcgggcttagcgccatctcgtacaacccttccgctagctggcgctgcagcggttgcgccacgttagccgcaggagagttaacaaccggttgcgcaacggcagcggaatggtgagtcgcgcagccgcctaacgtcgcgctgatggccagcgccaacgccggaagagtgtatttcattggaacaaccctataaaaaatcaatgacccggtggtcgcgcagtggccgatattgtgtgtttccggcctgctgtctttgcgtcaccctacgcctttgctgttccttgtgaacgactcactggcgcagatcgatccgtgcttagcctgcgaacaaaaaagagaatgagaactatacgcattatcagatatcaggcaacccccggcgggcaaaaaagataatctgctgattatttaacgtggaatagcggattgataggggaagaaagaaacttcgggatcgatacatacccggatagcggcgcactacgccttatccgggcgacaggaggctatgccgcacgcttcttgcgaagggcggcttagcacgcttaatgcaatttcaggcgcgggcgaataatccggttaatcccgccggacaacatcatcaggccggttttaaaataaccgtgcagcgtcacctggtgcatccgatacagcgaatcgtaaaccatccgcgcaatacggccttcgaccatcatcgggccgatcggtagatgccccatgatgctgccaaaggtcgtgtagccggagagcgaaaccagcgaaccacgatcgcgataggagaacgatttcaacttatgccccttcatccgggcgataatattgtcggcagtgaagagcgccatttgatgcgccgcctggccacgcggtggaataaatccaccttccggacgcgggcacgccgcgcagtcgccgaaagcaaaaatatcagcgtcgcgcgtggtttgcagcgtcggggtcaccaccagttgattaatacggttggtctccagcccggcaatatccttcatgaagtccggcgcttttatccccgccgcccagacgattaaactcgcctcgataaactggccatctttggtatgcaggccgccttcttcaacgccggtgatcatggtattggtcatcacattcacgccaagttgggtcagcttttcgtgcacagcgctggaaatccgttttggcagcgcaggtaaaataccgtcgccggcctctatcaggctgacatttaacgcttcgttggtcagatctttataaccgtagctgcgcagttcttttaccgcattatgtaattcggcagataattcaacgccggtagcgccaccgccaacaatggcaatattgaccttaccggtggtctgcgggtcggcggaatagcgcagaaattggttcagcatttgctgatgaaatatttttgcctgctcagaactgtcgagaaaaatacagtgctctttaacacccggcgtattgaaatcattggaagtactgcccagcgccattaccagagtgtcccaacataatttacgctccggcaccagcacttcgccctgttcgtcccgcagtgcggcgatggtaatcgttttattctgccgatcgatatctattaccgaaccgtgctggaaggaaaagtggtgtttgctggcatgggcgaggaaactcaacgcgtccacgccttcatccagcgaaccggtggcgacttcatgcagcagcggtttccacagatggctctggctgcggtcaacgagagtgatattcgctttctgtcgacgccctaatttgcgtcccagttgggtcgccaactccagcccgccggcgccgccgccgacaataacgatctcttttaatggcgtagtcaaggtgacctcccaaataattaattaaatgttaattaaaaacactctaaataatttttagttaacaataatccaaacaataaaatgccagtcatccattagatgattacgggatgcatattggtaatcgcaaatttaattggcggcaatttttaatcgggatattattgtacaagttttcgggcaatttccttgcacgcatattcgaggtaaacaaaaaggccactaaattattacttagcggccaggtaaaggattagataataataactattaagtcttatatttaatgagtggtaattagcggcatgcaggtattcctgtagtttaataacgcatcatcaccgatttaagttcagtataatcatcaataaacgcgctaccaaactcacggccaatacccgatcctttcatgccgccgaacggcaccgccgggtcgaggaaggtatgcatattgacccagacgatcccggcgtcaatggcctgagaatagcgcagcgcctggcggatattatccgaccagacgctggccgccagtccatacggcgaagcattaattcgggccagcgcctcctcttcactgcgatagccaataaagctgcataccgggccgaaggtctcctcgcgcatcagggtgctctcttcgctgcgcaccttaaccgccgtcggctgcaggaaatagccctcgccgggcagcgcttcgccgccgcagacgatggtatccccctcttcgcgtgcggtctgaatgagccgcaataccttgtcatattgctggcggttggccagcggccccatcagcgtttgttcatccagcggcgaccccggcgcgaaagcgctgagcctgtctttcagcagcgccagcaccgcatccagtttgccctgcggcagataaaagcgctcagcggcggcgcaaatctgcccctggttgaggtaaccggcttcgataatgccgttcaccatggcctccggcgtcaggtcatcgagaaacagcgcggcgtttttaccgcccagctccagcgtaacccgtttacctgacgcactggccgactgctggactttttccccggtcgccaccgagccggtgaagctcaccttggcgcaggtcggatgcgtgataaggcgttgggcaatttcgccgccggcgccgttgaccacgttaatgacgccatccgggatacctaccgctttcgctagttccgccacccgcagcagcgtcagcggcgtatactcgctcggcttgaggacgatagtgcagccacagaccagcgccgccgccatcttccagatggcaatcataatcgagaagttccacggtacgatgccgaccaccacgcccaacggctggcggcgggtaaaggcggtatatttctccccggccatcgacggcagcgagacatccagggtttcgccggtgattttccccgcccagccggcgaagtagcgcaaaaacgccaccgactgatccagctcgagcattcgcgccagcatgatggttttaccggagcagagactttccagttgcgccagctcttcgcgatgctctgccagcgtgtccgctagtttcagcagcaacgcgccgcgcgccagcgtcggcatctcgcgccactgattaaacgcctggcgggcgctttccatggcgcggtccgcctggccgacatccgccgccgtgatttcggcaatcgcctctccggtcgccgggtttatcaccgcgaacggcgcgccgtggcccgtctcccgatgaccggcaataaactgcccgtgcggctggcgtaaaaaggcggtcacttccgccagtaaggttatttcgctcatcgtcagcacccgtttttcagcaaagttagcccatcacagcacggttgtgccgcgccgcccatcgttctaaagaacgtcattcttccggacgatattcaacgcccgcgcggcgtgctgtgatgaggacattgagccaggcaagacgacagggtaacgcgatgaatattaaaatcgatgcgctgaactactacggcgcgacgaagaaataccagcttcatttcccggcgctacgggaagatatcgaagccgatgtggtgattatcggcggcggcttctccggcattaacaccgcgctggaactggcggaacaggggatcaccaacgtggtggtgctggaagcgcgccatcttggctatggcggcaccgggcgcaacggcggccaggtgatggctggaatcggccacgatatcgaagcggtgaaaaaacacgtcggcaaagaggggctggagacgctatttaaaatcgccaatctcggcgcgggtatcattcgcgaacgcatccgcaaatataatatcgacgccgatttcgtccccggctacggctacctggcctataaccagcggcagcttaaaacactacgccagtgggagaaggagtttaaagccgccacccccgatgaagaaatcgaactgtataccgggaaagaggtgcagcaggtggtcggttccgaagtttactgcggcgcgctgaaacatatgggcggcgggcagatccattcactcaatatgctgcttggttcggcgcaggccgcgcattcgctgggggtgaagattttcgaatcctcgccggtggtggaggtgaattacggcaaacaggtacgggtgcgcaccgcgatgggcagcgttaaagccgccaaactactgtgggcctgcgacagcttcctcaacaatatggagccggagatctacaacaaaacgctggtcacctactcctatcaggtgtcgaccgagccgctctccgatgaactgatcgagcgcatcagcccgctgcgcggcgccttcagcgatattcgcccggtgattaactactaccgcgtcactcgtgaaaaccgcctgctgttcggcagcgctacccgcttcgtggagtatacgccgaacgatttcgccgcctggaaccgtacgctgctggcggaggtcttcccatacctgaaagatgtgaagatcgatttcgcctggggcgggccgatggcctgtagcgccaacctgttcccgcagattggcaccttacgcgaccataacaacgtcttttacgtccaggggtactccggcttcggcgtcaccccctcgcacatcgtgtgcaaaatcctcgccgaagggatcaatggcggttccgaccgctatcgtctgctaagcagcattcctcacgcgaccatccacggccgtgacagcctgcgcttgctattagtcaccgccggaaaactaatgcatcaaaccgccggtttctggaaaggccggagttaatcaggagaacgctatgcacgcttttaaactcaaacacccggtacctgaactgcagccgatcggcagcgtcagcctgctcggcgcgacgccgaccggcggcgacccgcaggtagccggcgcgatgatctacggcgagccgcaggacgcctttacctgcgggctgttttcgtccaccgaagggagctttaccatgacctatccgtttaccgaacacgccaccgtgctggaaggcgaagtggagctgaccgtcgccggtggcgagccgcagcgcttcgcgccgggggacagctggtttgtcaaacagggtaccgaagtggaatggaaaatcctcaccccacgtttcgtcaaacactatctggcgaacgtcgagacgcgctaacacgctgataatgcccggcggcgcattacgccttcgccgggctaccaaatcgcacagcgctgtagccccggtaagcggcagcgccaccggggattttgaggccaaattaaaggcaggccgcacggaccgtaggccgggtaaggcgctagccgccacccggcagaaatacgcgcaacgtggcaagacagatggccccgctttccggggctattttatttatcaaccgccacattcatggcccaggtcacagattcacccgttgctctccaccttccggacgatattcgttgagcaggatgcccgcctaaattatgactatccgggagtggcgctggctattccctgccctcccctacattgtgcagaggttgactatgtttagtaacagactcgccagccatcttgaacgcggcgtcgtcggctttccgacgaccctcgccagctcggttgggctgattatggcaagcccggtgatcctgacggtcaccagcggattcggcatgggcggcgacaccttcgcgctggcggtactgctggcttttattatgatgcaggcgcaggtcactaccttcgctgaagccgcgacgttaatccccaccaccggttcggtgtacgactatatctcctgcggtatgggccgcttcttcgccattaccggcgcgctgtgcgcctatcttatcgtccatatcttcgccggcaccgcggagaccattctcgccggcattatggcgctggtgaacttcgaatcggtcaacgcgcagatggccgcccatcaaaacacctggatggtcggcgtcggtatggtggtcattttcggcctgctgaacgccattggcgtggaaattttcggcaaggtcgaagtggtgctcacctttggcatgtggacgacgctgaccattttcggcctgtgcggcatttttatggcgccggtgactcacctttccggctggttcggcacgccgctgaacgttagcgatatctccggcctgttcggctatatcggcatggcgatgtttatgttcgtcggctgcgaactggtgacgccgatggcgccggaaatcaaaaaagcccaccgcaccattccgcgggcgatggcgctgggtttactgggcgtcgccagctgcatgtttatctacggcgcggcgattaaccgccaggtggaaaacgtggtggtcgatgcggcgaataacatccatctgctggacacgccgatggcgatcccggccttcgccgagcgggtgatgggccacgccggccagtactggctcggggtcggcctgctgctggcgggctgcgccacaattaataccttgatggccgcagtgccacgtattatttacggtatggcgctggacggcgcgctgccgcgttttcttacctggctgcatccgcgcttcaaaacaccggtgatcgcgattgccatcggcgtggccatcccctgcctgcacgcctggtacctgaacggcgatctggaccgcatcgtgccgctgatcctcgccgcggtctgcgcctggggcgtagcctatctgctggtcaccctgtcggtggtgatgctgcgcattcgccgcccggacctgccgcgcgcctaccgctcgccgtggttcccgctaccgcagattatctccagcgtcggaattatcatcgcgatcgtgaatattaccccaccgggaatggacagccgcgaggtgctggtgccgttcgggattatgctcggcctgaccgctgcctatgccctgttctggacgctgtgcgtacagcgcgttaatccgttcaagccgctggaggtggaagaggtggtcgagcgcgctatcggcaattacgagaaacagacccgcggggagatgacgcctgatgtcctccgtcccctggtttgaaacgccattaatgaacgcggtgcagcgcgacttagcgggctggccgagcgaaaaactgagcgaaagcagcgcgatgttgcggctaaacgacgtcaccgccgtcaccttcagcgtgcgccagaagcggctatttatggccagcattcacagctgcgagtttgtcgtcgaggggccggttacccggcccgctcgcggcaagatccgcgcccaccaatccggctggctaaaacgcctgccaatccgttttatcggcagtaaagagagcgcggaactcgccggctatctcaatggttttcctaatctccaacagaccttaagcgagctggactaccgccgcttttcgttgacctttgacgatagcggctggcgctgctgcattgaaccctgggccgccagcgaagtggtctgtaaaatgccgccgctgcgccgttatctgaagctcgaagcgcagcagcggatgctgctgctcagcgtgctggcgatgattaatcaggcggtaagtcagtggatgcgcggtgaaatcgcagaagggaaagcattgacttccccgccatcaccgcggggaagctgaggtggtttatagcagaccaaactgctgcgccagccgatcgatggcctggcgctggaactgcgcgaatgcggcgcgcggctgctgctgctgaataaattccagcagcggatcctgaacctcggtgcgcaccccgctcagcgtttccatcaccgccaggccgcaaaacggcacgtaggactcggcgtagccgccttcatgcaccatcaccagtttcccgccgcatagtcgatccgccgcctgctggacctgttcggtcatcgcgcggaagctgtcgctatgtagctgcatccgcgctaatggatccatcgcgttggcgtcatagccgcaggcgacaatgatcaactccggttcaaaacgcgccagcgcgggaatgacgatagtttccagcgcatagcgccagctgtcgtcgcccgccccggccagcagcggaatattgatgttgtaaccttcgcccgcgccaacgccgcgatcgtcctccccggagtagcccggcgggaagcagccatcctgatgcaatgagatagtcagcacatcatcgcgctgcagatagatatgctgtgtaccgttaccgtggtgaacgtcccagtcaataatcgctaccttgccgagccccagcaacgctttcgcccgttcaacggcaatgggaatattggcgaggaaacaaaaccccatcgactggtccggcaggcagtgatgtcctggcggccgcgacagtgaataggcgttatccagctcccctttcaacaccgcttccacggcggcacaggccagtccggcggaaaggcaggcgatttcataactccccggccccagcggcgcttctttgccgagcatgccgccgccgttatcgctgattgccttaaaacgctcaagatagctatcgggatggatccgccgcaggtcctcaaggctcgccgccgccgcgctgcatagttccagctgcggcgtcagcccggagacgtccatcaggtttttcatccgccgtttggtctccggcgactcggcatggccgccgccagccggcggctgcacccaaccaccgaccggcagcgttaccgcgtgcaggccggtactgtgccagaaacaacgttcatcaaagaagaaaccggtttttcttttcactctatcctcccgttggctaaaccttttccggcggacgacgccgccgcaatcaaaatcagcgacaacagcgcgcaggcgcctgccgccgccagcagcggattggcgctggcgaagtgttgcagtaaggcccccgcgagcgccggaccggcggccattccgccgccgatcaccagattgatgctgttcatcaaccggccgttattatcgagcgcggccacgcgagcgaggataaagggcagcacgaatgtccaggtgaacttaaacagcagcgccgcaatggcgtaacgcaccagcagcggatggcccgtcagtaacagcacgctggcgatcagcagcgcgtatcccagccacaccgccagccggtccgggcgatgagtaccgcgcagcgccgcgccgcctgcgccgataatgccgaacaccgtcgccgccgccagcaccagaccgacctgtgtcggactcaaccccgccccgctgccgatggtgccgataaaggtccataccgcgctgaggctgatatagaaggtgagaactgcgagcaccgccagcgcctttcgccacgacgccgcaggcggctggcgatgggaagccgatcgcgcttgaaaacacgacgggaaggcggaaaccagcggcaaacagcagagcatgatggcggcgagaatcagataaacaaccttcaggccaaaggtcacgaacaggccgggcaacaccagcaggccaagcatgcctaacagcagctgccccagtacccagaatgcgtacacccgcgatggattcggcgttcccgccgcgcagctgatgcacaaaatcattagcgtgccgcccgccagggaagcaataaagcgtaccgccagcagcgacgcatactgagttaccaccgccgaagcaaggttagcgagcagaaataccgcgcaggcgacgagtgccacccgccgccagtcgaggcggttcatccaccaccacgccgggagcgtcgccaggctcatcgcgccgagctccgccgaaaatagccagccgatctgtcctggtttaaggtgccattcgctggccagctgcgccgccaccgccggcgcggtcattaaaatccccggcgcaatggcggcgaaaataacaatcgccgccagcaaacgcagcgacaccaccagcccgtcaggccgggaaagggtattttcagaaagaggtgtactcgacatcgtagggcgtgctccagtcaaaaaagcctccccccggacggttatccagggagtgatacccacaggcatcaggaaaacgccgtgctgccacggcgcgcgcgggatgcgatagtcagattacagatgcagcgtacgctgagcggcaggcatccaggttcgggaaacgagttcagtccggttgacgacttcggtcttggcgaaaatattgcgcaggtgggttttcaccgtcgagagcgagatatccagctggcgggcaatcagcttgttgctggcgccttcacgcaccatgccgacgatttcgcgctctttggccgtcaggatggcagggagttcatcctcttcctgcaggaaatcgcgaatagccaattccaccaacggcagtaccgcctgggcccgcagtcgttcctcgctggaaaaaggcacgtcgcgcatcagcgagataccggcaacgatccgccgttcgcggcgaataaagatttcggtcatgtcgcgtacgttattcggcaacataaattcatgatagtaatgacggttgcggtcacagagtcgcggcgtcatcgctgccatggtcgtactctggtggctaaagtgcgccggcaggtgtggatccaacggctggaagctctccagatattgttggtgtgtattatccgaaatattatgcaatatatagttttcaggttttaaacgattatttactcgataaaaaaccgctgaagacagtggaattaactgtgaaatagtctgtaaacaacgggctattatcgcatcattacgactggcttttaataaagcagacatgatatttccccccgtcaaggtggtggtgcgtaacacgcggattaccagagtaagatgaagcatacatttcacatttaagtaacacaatcattaacatgttaacaatgtgatatcgattacattattttcatcaatgcattgttatttaaagcatttaaaaacatgacagcgttctgttaacgtatacacgttaaaacataaacaaaagttattaacatcacgcgctattttccggcaaggattaaaaacccttatattggcaggtccgatctcatccttaagaacgatagttttttgcattttttcatttataccctaaaaaggatgtcgataatttaacgccgcggcttaatcaacggattacgcctgacttgctattgcccaaatatgccgcccaggccagcaattaatagaggataagccgatgctgaatatcgccgccttacgccagcagcaaattccgctggccgttgaaccgcgctcatcgctgccgtttcatattctgatgaaaccgattggtcccgcctgcaacctcgcctgccgctactgctactacccgcaggatgaaacgccggtcaagaagatggacgaggcgcggctggagcagtttatccgccgctatattgccgcccagcccgccagcgcgcgggaaatcaattttgtctggcagggcggcgagccgctactggccgggttaagtttttataaaaaagcgctcgccctgcagcagcgctacgcccctgatggcgtaaccatcagcaatagcctgcagaccaacgggacgctgatcaacgacgcctggtgtcgactgtttcgcgaacatggctttattatcggcgtcagcctcgaaggtagcgaagcgctgcaaaaccaccatcgtcctgataaacgcgggcaggcttcctggccggctgcgctgcgcggtatcgccctgctccaccagcatcaggtggagtttaatctgctggtggtggtgcataacgaaatcgccgcccacgcggcggcgatttatgaccgggtggtcacgcttggcgcgcgctatctgcagttccagccgctaatgagcgaaggcgccgcgctgcgtaagggttatcagctcagcgctgataactgggggcgttttatggtcggtatctggcgccagtggcaaaagcgctgcgatatggggcgggtattcgtcatcaatatcgaacaggcgtgggcgcaatactttacccataccagcggcagctgcgtgcatagcgcccgctgcggcagcaatctggtgatggagtccgatggacaactttacgcctgcgatcatctgatcaatgccgaacatcgactgggtcgccttgacgagcagacgcttgccgccgcagttgacgcttcagttcagctccctttcggccagcaaaaaagcctgcgccgcgaatgtcagacttgctccgtaaaaatggtctgccagggtggctgccccgcgcatctcaacgccgctggcaacaatcggctatgcggcggttattaccgtttctttagcgaaatcctcgcgccagtacgccccttttcccgcgaccttaacggcctgaaagcctggcgggccgcgtttgttggggccgcgcatcccgcgtagccctttgccctgatggttgtcccactatgaacaggagagtcagtcgtgaacaaaaaagccatggccgcggcggtcagcatgatcctcgccggcggcgcgcacggcgcgcagaatgagcatccaaacgtcatcgtgattatcgccgatgatatgggttattccgatatcagccccttcggcggtgagatccccacccccaacctgcaggccatggcggagcaaagtatccgcatgagccagtattacacctcgccgatgtcggccccggcgcgttcgatgctgttgaccggcaacagtaaccagcaggccgggatgggcggcatgtggtggtacgacagcaccattggcaaggagggttacgagctgcggctgaccgaccgcgtcaccaccatggccgagcgctttaaagatgccggctataacacgctgatggccggcaaatggcatctcggttttgttcccggcgccacgccgaaagatcgtggctttaaccactccttcgcctttatgggcggcggcaccagccattttaacgatgcgataccgctcggaaccgtcgaggcgttccacacttactatacccgcgatggcgagcgcgtctccctgccagatgatttttactccagcgaagcttacgcccgccagatgaatagctggattaaagcgacgccgaacgagcagccggtcttcgcctggctggctttcaccgcccctcatgaccccctgcaggcgccggacgagtggattaagcgctttaaaggccagtatgagcagggttacgccgaggtctatcgccagcgcatcgcccgcctgaaagcgttgggaattattcatgacgacaccccgctgccgcatctggagctggataaagagtgggaagcgctaacgccagagcagcagaaatatacggcgaaagtgatgcaggtatatgcggcgatgatcgccaatatggacgcgcaaatcggcacgctgatggagacgctgaaacaaaccgggcgcgataaaaataccctgctggtgtttttaaccgataacggcgccaacccggcacagggtttttattacgaatctacccccgaattctggaagcagttcgataacagctatgacaacgtgggccgcaaaggatcctttgtctcctacggtccccactgggccaacgtcagcaacgccccctacgccaattatcacaaaaccaccagcgcccagggcggcatcaataccgactttatgatctccggccccggcattacccggcgcggtaaaatcgacgcctcaacgatggcggtgtacgacgtggcgccgacgctatatgaattcgccggcatcgatcccaacaaatcgctggctaagaaacccgtattgccgatgattggcgtcagctttaagcgctatctgaccggtgaaacgcagacgccaccgcgctcgaagtacggggtcgaattgcataatcaggcggcctgggtcgatggcgactggaagctgcggcgcttagtcaagctcggcctcagcgccggcgacgcgccgtggcagctgtttaacctgcatgacgatccgctggaaacgcacgatatcgcggcccaacatgccgacagggtcaaagccatgagcgacgcctacgaggcatttgctaagcgcaccatggttaccaaagcgcagggcaagatgatcgattatgtcggcatcgatagcaaaaccggacgctacctggcggtcgatccggcgaccatgaagccggtgcccgcgccgcaagccattcctgtgagcgagggcaaataaacgaacccggttatcgttcttccgggcgatagccggaagtagactcgctttctaaggtaatcctgaaccccattacaggagagagcggatggcgagagtcgtggtgattaccggcggcggaagcgggatcggcgccgcctgcgctcggttgatgagcgcggcgggagatcgggtgtttattaccggcagacgtgaagcgccgctacacaagatcgccgttgaaaccggtgcgacggcgctggtgggcgatgccgccgacggcgacgtctggcgggaacggctgctaccgccgattctcgaccagactcacggtattgatgtactcatctgcagcgccggcggcatgggcaatagcgccgccgccgataccagcgatcgccaatggcgcgaggcgctggacgcgaatttaaacagcgcttttgccagcgtgcgcgcctgcctgccttcactgattgcctgccgcggcaatgtgctgtttgtcgcctccatcgcctcgctcgccgccgggccgcaggcctgtggctatgtcaccgccaaacacgcgttaattggcctgatgcgctccatcgcccgcgattacggcccgcagggcgtccgcgccaatgcgatttgtcccggctgggtcaccaccccgatggcggatgaagagatgatcccactgatgcaggaacacgggctgtcgcttgccgaggcctatcaacgggtgtgccgcgacgttccgctacgccgccccgccagccccgaggagatagcccaggcctgtcagtttctctgctcgccgcaggccgccatcatcagcggcgcgacgctggtcgccgatggcggttccagcatcgtcgatgttccaacgctggcgtttacttaacgccctactctactcaggagctcacatgacttcagaagccgtatttatccaggtcggcgcgctggccgatggtttcgccccgcacggcaacctgctggccgccgccagtctgcccgcaggcgaacgctttaccttttatgccgacgggagcgagccgcagcagttggttatcgaaaatgaccagacactgctttggaacggcaaacgcgcgccctggcgggcaaccgccctgcgccccgatattctgtttatcgattttcttgacccggagcgcgataacgccagtatcagcgcggtatgcaacctgacgcagcgcaacgccacgctggtatacggccagctaccggacgaagccgccgcgcggctggacgccttcagccgggtagagcaagggttgccgctgaccgccgtcgaggcgcgatttgtcttcgcccgcctggatacccagccgggaccgctgccggactttaccaccgcgctggtcggcatgcgcaatcagtacacctatagcccgaccgagcgctatgaacacatctatctcaacgataatttttacgcctggcagtgtctggatggcgtggaaaaggggctggcggatgtcgatcgctgccattacgtgcaggtggctgaggatctctatttgttcgtctggcgggagaaaatcattcccacgttgggggctatcttgatcgatcttcagcagatgcgtaccgatggtaagatcatgggttatcagggcagtgattttggcgccttgagtaatttcccggtcggcgcgagcgcgaagatcctcaacgtcacccgccatcaggaataatattgcgtggccgggagacgcgcccgttcaaccggaagcgccccatccggttgaacgggccctgcgggcgcgggtgcttcggcatcaggcactgacggaaatgcatgttcaggagcagaaacggcgggtgagcctgatgagtaaagggggtcatgtgtcgctacgccgggcaacatccgcggataaggagcagctttgcgccggatggcggctgcgccttatccggcctaccgttcgtggggcccgccgttaatttattcaccatggtggctgaaactgccgaggttggtggcctcaaaatcgctgagacgttcccggcaggccggggcagcccgcatggatgcgggctgagggccgtgatttgcagggacgctgcctcggcccgacccgaagcctgccgggataagtcgaaggcaccacgaagtggcgattttggcggccagagcccgggagtacagagggcggcggcgactggccgccctctgtgcgctccctgcgccacagaaaacatattgcagaaaaattaaccgggagcgcaatatactccgaagcgccacgggataaacgcttttctcaggctaaaaaagttgaaaagtggtaacagtatctacggtccgggtggcctgccattaattattcaccatggtggctgaaactgccgaggttgggggccgcaaaatccccggtggcgctaccgcttaccggggctacggcactgtgcgatttggtagcccggacaaggcgcaacgcgccgcctccggggagaggggctgactcaggcgctggcgctgtcgagccgcgccaactgctcgctgctaaggctcagcgccgccgcgcgggcgaagctttccacctgcgccaggctggtggcgctggcaatcggcgcggtaacgccttcccggctcatcagccacgctaacgccacttctgcgggcttcgcctgctgttcttccgccaccgcgaccagtgtgtcaataatccgcattccgcgtggattgagatatttagcgatgccgctaccgcgctggctttgcgctaaatcggacggctggcgatacttaccgctcaggaagccggaagccaggctgtagtaggtcaccacgcctatatcgcggctgacgcagagatcgcgtagcgccccttcaaaggcggaacggtgatagaggttatattccggctgcagcacctgccaggcaggaaggcctcctttacgcgccacttccagcgccgatgacagctgtccggcgtcgaggtttgaagcgccaatcgcccgcaccttgccggcctgctgcagcgcctggaatgcttctaacgtttcatcgattggcgtttcaggatccggccagtgggcgaaatagaggtcgacgtaatccgtattcatgcggcgcaacgagtcgtcaatcgcctgctggatccaggcttttttcaatcctttatggccgggtagccccatatcagagccaactttagtgaagattttgactttatcgcgtatgcctgggcgcgcctgcagccagcggccaataatggtttcggattcgccgccctgattgccctccgcccagcgggaataaacatccgccgtatcgatagcatcaaaaccgtggtcaacaaaagcatcaagaatggcaaaactggttttctcatcgatggtccagccaaagacgttgccgccaaatactaatggggcgatggaaaatccgcttttgcccaatggacgtgtcatcatgccgattactccttagcttatattctgtttccctcagataaccgcagggggtctgaagaggatgtcgagtggataatcagaaaaggaatcttgcggcgggcagtccatgcccgcagggtacactctgacattatgtcccggaataaacgtcaaagctaaaatatttcccggccagttttttgtaggtgccgtcggcaagcattttcgcaatcgcgccatttatctcttcgcgcagcgcatcgtcgccttgacgcaggccaatcgccgccccggcgccgaacagtttattatcctgcagttgtccgccaacaaaggcgaaatccttgccctgcggctgctgcaggaagctgtaatcggccatcatgccggagagtaccgcgccatcgagacgacctgattcaaggtcgcgaacgacgctatcggctccctgataggcgacaatattaatcccctgcggccgccagtactggttcacgtaagtttcctgcgccgacccctgctcgacgccgatggttttccccttcagttgctctggcgtattgcctttgagggtatttttgcgcgccaccagaaacaccggcccgttgtacagcttatcgctaaaagcaatctgctctttacgcttctcggtcatatacatccctgagaggatcgcgtcgaatttacgcgccttcagcgccgggatgatgccgtcgaagttgctttccacccacacgcacttcgcctgcagttgctgacatatcgcgttgcccaaatcgatatcaaatcccgccagcttgccctgcggatctttccattcaaacggcgcgaaggtcgggtcaacgccaaaacggatctctttcgccccggcggccagcgccgacgtcgacgccattaatgccaaacacaacaacagtgattttttcatttgaagtcttctccagggattaacggcagtgcgcttgcactaaacgcgcgaacagcgtcgcgccggtgctgataatgtcatcgttaaagtcataaccggggttatgcaccatgcagccgcccttctcgcctttttcaccgttgccgagcaggaagtaacagcccggacgctcgcgcagcataaaagcgaaatcttcgctggcgttcattggcgataccgactccagcaccccttcgcggccaaagacttccagcgccagcgcctgggcgaaatcggtctcttcgttactgttggttaataccgggtaagagtcgtaaatctcgacttcgctgctggcgccatagcttttggcagtaaactcggtcagctcttgaatacgcttaatcagcagatcgcgaatttccggtttcatcgcccgcacgctgagctccatcaccacgctctcaggaatcacgttcgaggcgatgccggcctggaaagtccccacgctgacgaccgccgtttcacccggcggcacgttgcgcgcgacgatgctctgcagcgccatcaccagcgccgcgccggccacgatagggtcgacggttcgttccggatgcgcgccgtggccgccgtagccggtaatcgtgattttgaccgtgtccgccgaggccataaagttgccggcatagaagcccagcttgccaaccggtagccccggcatattgtgcaggccgaagatgcgttcgcaggggaactgctcaaacaggccatctttaatcatcagatccgcgccgccgatggcttcttccgcgggctggaaaatcagatgcaccgtgccgttgaactggcaggccggcgaggcgatatatttcgccgccgcgagcaaaatcgtggtgtggccatcatggccgcaagcgtgcatttttccgggtacgatactggcccagggtaaatcggtggtttcataaatcggtaatgcgtccatatcggcgcgcaggccaatagtgcgcggcgagtcgcctttgctcaggctgccgacgacgccggttttaccgaggccgcgggtcacctgatagccccattctgtcagcttaccggcaaccagctcgctggtattaaactcttccagacttaattccggattggcatgtaaataatgacggatagaaatcatttcatcttccgtggctttaatttctggaattacacaatcagacatgccgttctccgggaatagattaagaacttaacaagttatcctggctcaaagtttatgcaagtagcatttctaattgctggaacgccatccatcatatttttaatacagacaaatcgcagaacaatagccattaaaactggcaaaatttaaatataaacgtttattttatgggttacacaccaacacttactctactattcccgctttaattcagttttaaataaaaataaacagccatgaaatatcatttacttttacttgcctgcgcgctgacgctaacaggctgcagcgctgagggcgacaccgccagccagcaacgcgccagcatccaaaagatgcgtaccaacacgctcagtaaactctatagcctgtatccacaagcgcgtagcgatatccagcattcaaagggctacgcggtcttcgccagtaacagcagcaagatattagtctttggcttcggtagcggttacggcgtggtgaaaaatagcgccaccggcaaagatacctatatgaaaatggcccagggcggcgccggtgtgggtatgggcgtgaaacagttgcgtaccgtactggtattccacgataaagacgcattgaatactttcattactaaaggctatatggtcggcgcggatgccaacgcggcagcgaaatatgacgacaacggcatcgccccgataggcgcgtcagccaacggcgtggcgaaagatacctcttcgctgccgtcaaaagtcaacgtttatgaaatcaccgagaaaggtttggcggctcaggcaatggtcaacggttataaatactggccggatgacgagctgaataaaaggtgatccactgcggtccgtacaagttagcatcaataagccgggtcagacgttagcctgacccggcgcgaatgccatgccgcaagtatcattatttaatgaccgagggcgccgcttaccagaattgaagtaataattccggtcgctgcggcgatcagcacgtaattgccatcgatataagaccagtgatgaccctccggcgggcgcggcaggccacgctcgttccagttactcacgcgatattcatcaccgcgataatgctccggcgccggatggcctttacggaaatcgttacccctccaggcgaaatggtcctgttcatggcgttcctggcgacgatcgtcatgacctcttcggtccgggccgcggctatcattgttgccctgatggttatcgccaggaccgcccgactggtggtgtccattctggtcaccctgcttcgggccattctgccatacctgctgttgccccggacgatgaccgtcatttgggccatcggcaaaagcctgagcgctcagcacgcaagataaaataaccgccagagaaataatctttttcatagtacacctcctgatatatctcttttttaccctgcaaatgtggagaaatagtgattagcaacctatccaggactattcctggctaattcaggaggacagcaaacaataatttcagcgagcgccagacgtaaaaaaggccgctaacgcgaccttttttgttctcagcgagtcagtattactcagagactttattctttaactcttcagcgccttgcttggttttatcccagcctttctcgctgacttctttggttttatcccaacctttgctggcgccttctttagtggcgttccagcctttctcagtgccttctttggtcttatcccagcccttctcggcgccttctttggttttattccaggttttctgcgtgccttcgcttatctggctgccgacgctatcgcttttcccttcagcagcatgtttggacttgagcttcatctcttcgccctgattctgcgcctggtgcagtttttcttttgccgtgttggcattttcgtgggctgcggccacggtatcatcggttgcatgtgtagtggttgccgcgaataccggagaagcgaccagaatagcggatagtgcaatcattgcttttttcatatttttcctctcttaacgcgtgctttatgttacgagtcacattcagcatggcataagcttctgcgcttggcattaggaaaagttcttaaaactgcctgaccgctattccgtcgttttagtgatcgagatagagatagctttcccagcttttcatacggatgaggatctttcttatcagcgacaggtgctcaaaatgttccgaatagacggcggcttcgacatccgcgccctgcggcagctgataatttgccagacgatcgtcggtcacttttaataccaccagcgctcggccgcgcgccgccagatcgttggccgtcagcaacgtcccctgaccctgaaactggctttcgccaatcgccggcagcacttccgcgacctgcgctttaaatacggttcccggaatagaggggaacagtaattcagcctgttcacctttttgcaaacgctgcagcgcgttctgacggaatgcggcgacgtattcacgtgaattcgcattatccgttggcacaaacgtcattaccggcttcagccccaacgcggtggacatggtcccaggacgcaggccgacggtactgacatagccgtcagacggcgcgcgtaccaccgtgttatcgagcttaaattgcgcctcgcgcagctgcgccagcagcgaagcgactttagtgttctcgccgtgcaccaccgaattgagatcgttacgcgcctgtgcgacctttgcccgggcggcgtcaaccgccgcctgcgtcgctttccagttctggcgacgggtatcgaccatctgatcggaaaaggcccctttatcatgacctgcctggaagcgggcgtattcacgctgggcccggtcgcgctcggcgaccgctttgcttaaatcagcctgcgcgctggttaaccccgcatccagcgacaacgcctcctggctggccgctttcacttgtgcggtcaggtcgtccaccttcgcctggaacggggttgggtcgatggtgaacaagatgtcgccttcatgcagcatctgatttggtttcaccggcacgctggtgactcgaccgcgggtttgcgaaacaatgggcaccgtgcgataaacctgcttcccgacttcgctataggggaagttataattcataccgaggattaacatgccaatcagtatcacgccacctaataccgcagtgggaaccgtccatttatttaatggaatacggaatactttaaatatcacgatacacaaggcggcataacacagcagcaataacgtttccattatttaccctcctgattgacggcgctatttttcagacggtttaattccgcctgcatcgcatccagacgctgatgtaaatcgtgctggtcggtctttaactgctgcattccccagccgcggtcttctcgccacagcgtggcccagatccacagcagcggccacagcacgtgcagggtgaacaagctcacccagccagcgtaatgaatcgcatcctggtgcggatgatttctttttttggctatttcatacggaatatcgtggatcatgataattccataaaataaaatcagcaccaccgcaatcaggatggctaaagcaatataatccagggtcataaaataactccagaatgtgtgacgtatttcacattcactttatacaggcgtcagcaagccgggcataatcgccctgacaactgaccatattaatcagaatttatccggtatttttcggtcgatagaaataagttgaccttttttcaccgtgatataaccgccttcttttaacgccgctaaaacctgataaacatagctgcgcgaaagattggtccgtttaataataaaagcggacaggctttcacgttttccacaatcgatctcgttacggtacagataacgcgatagcatcgattttatggtctgaaaaccggacaggttgccgcgctcgttgtgcgcatcaagagcaaaaatgcccatgtaggccagaatagtcgtcagctctttcatatactccggcgaagagtaaaagaagatacgctcgaaatcctccacgctgattctggcaaaacggcagcgatcgagacattgatatagcagctctaccgccggacagtagtgctcaagcaggcccagcggcatatgctcgatcacaatccccaacaggttatcagggtcgttgactgcgagggtgatttgcccggacagcagaaagtaaatgaacccatcctgcggatgaaaacgctcgccggcggcgcactcgacgttttcgctacaggcgatgacgtgtgggagatgcgcatttaactgcagcttctggtagcaggcatgaatacgaccaaaactgctgttcaacttccccgtatccattgccgtactttcccgtatcaccgacgtcatcaaatatatataaggcaaagcgcggggaaaagtccacagctggagttttggcgtaaagatatgtgtggcaagactatttcgctgctccacgatgcaataaatcagcatatatcgccgttaaaatcccgccggggcggaattgcttcttaatccactgcgtcacctggccggttgccgcgtgctgggtggccagcaacatgccggaatcctggcgcgggttgtggatctggcggatcaccaacagattctccgcaatggcttcatgagccatatagtcgggtaagaagccgatcccttcgccgaggatctgacactgacatttggtattgaagtcgggaaccaggatcgcctcctggccatgcagcagccaaccgacctttttattgatcgtactggcggtgtcctcaaccatgatattgggatagaggcgtaactggctttctgaaataggttcgggcataaacgccagcggatgatccggggcaatagcaaacacccagcggatcgcgccgatctcggtataatcgattccgccgccgtcaagtagcgtatccggcgcgccgatagcaatattcgcctggttattgatgatcgaatcccagacgccgttgtatacctcggtggtaacggttatctggcaggtgggaaactgttttttcaacacctgcagcaggcgggcggtatggcgcggcgtatatagcagttgattgatgcagatgcgcaccctcgcttcaatgccctgcgagatagtatcaatgctgcgctttatcgcatggaaatcattaagcagatcggtagccttgcgaaacagatagtagccagattccgtcagttcaatgctgcgggtgttgcgggtaaacagcaccacgtccagcccggcttccatccgtttgatggtatagctgatggctgaggtggttaaccccagctcatcggccgccttgctgaagctgccaaaacgcgccgcggtggtgaatgccagcagattttcttcagtaaaaatcgagttcatgcgcccttcccgcctccgctaaaccatacctgagctgaatgtattggttaccggggcgtggggcaatcatttttgaacaatgcttaatacccgtcgcggcttcaggctcgctccttactggtcgcctcgctgagtttgcgcccgctatattctgaaataaagccaacgcagttgcccgccagaaatcccagcaatgtcaccgtccagttcaaaccggtggcgaaaaagagcgtcatgccgaggaagccgccgggaataaatgaggttagcgtaaagcgcccctgccagacgatgactgccgaaaacggcaccgtggtaataacgcttgcccagaaccccgacataccgctggctgaagcgagagcgccggcggccagcgccgccagccacgcccacactgccccggaatagttaacgcacaggcttttgacaaagccggattggccaccccctgccgcatagaaactacagaacgcgacgaagccgatggttcccaataattcccaaccgtgctgcagcccgacgtgcgaggaaatgagctgccaaacgcctgcgcaaataccgacggtgatccccgtagcggtgagtccgttcatctctttcccctctgaaaaatagattgatgacgttgctttctgacggcaactatatcgaaagaaaacccgattgcgttaaggggtataagcgtaaagaagtaaacattgctctgccgcacagtctgcatcgattgttgaaagttattcaataatctaccggattatggcgaataaaatttaagcgggttcttttatctatttctggttgctatgctcaagccatcgagaaagtctcagccgcaacaacaggagcaagatgatggccacggaaaatattattgctgactatcttttggctgcagagcagggaaatattgcgaaattaacagcctgcctggcaagtggcgtcgatattaatgccagtaatcgtcaggggcgaaccgccattaccctcgccagcctgaataaacattatgcttgtgtctcggttcttattgccgctggcgcggatattaataagcaggatcaaacctgttttaacccgtttttaattagctgcctgaataacgacgtcgaactactgcgcttaattttgccggcaaatcccgacctcgaacgattaacgcgttttggtggcgtaggcctgaccccggcctgtgaaaaaggccatcttgagatcgtcaaaatattgctgacggaaaccaatattaacgttaaccacaccaatttcgttggctggacaccgctactggaagcgattgtcttaaacgacggcggtgcgacgcagcaggagatcgtcaaactgctgctggaccacggcgccaacccgcatatgaccgataagtacggtaaatcgccgctggagctggcatgggataagggattcagtgaaatcgcccacctgctggtcgccgccggagcctgaggaaggagaatcgccattaacacctcctcctggcggtgtgtgcaagcgctaactgcggatgagagctttctctcgcagcgcggcggcggacaggtcgagcaggttttcactcatgcggtgaacctgctcatccccggcaaaccagggcttctgacgctgttgtgtgaaacctctgataatgcgcccaatagctgtaggttagcactcacccactttgacaacctgctccggccaggggaaagcgtccggtttaccgattcagggatttacattggcgataatacatggatagacatccaccgttgtgagcgctggcaaacgccgcaggcggtattaaacgcggcaacatttagccagatagcctggcgacgatggcgcaacattatcgttacgcagttacatgaggatgacacgttatttctctatcgcggcgacaatcccttttatcacgcgatgcgtcatgaactccagcagcgacgggaaaccttatttaaagcgcttggcgaaaataaaaatatcagcgccgccgtggcgaacatgatcggattaggcattggcctgacgccatcggcggatgattatttgctaggtctaagcgttattttattcataaaggggcacccggctaatcaataccgggaagcatttataaccgcgctgcagagcgcccgacaaaatactacgccgctcagcgcgataacgctggaggcagcgataaaccaacgttatcgcgaaagtatcgccgtgttgattaatctgctggttaatcaatcgacaaccttttctattgaggctattgccgatattaaaaatattggctcaagttccggcagcgacatgctattgggcatggcggatgcctgcgcgctgagccaaacgtatggagggaataatgtcagttaaaatagtggtgaagaagaatacctattttgattccgtctcattaatgtcgatttccacccgcgctaataagctcgatggcgtagagcaggcatttgtggcgatggcgacggaaatgaacaaaggggtgctgaataaccttgggctgctgacgccggagctggaagcagcgaaaaacggcgacctgatgatcgtcatcaagggcaaagacggcgccgattgcgaacagatactcagtgaaatagaagcgctgttcagcaaaaaggccgaaagcggccagcacgaagcgcgctacgctaccctcgccagcgccaaaaaacatcttccgcaaagtaacctcgcgattatttcggtcaacggcctgtttgccgctcgcgaagcgcgtcaggcgctgcaaaacgatcttaacgtgatgttgttttccgataacgtctctattgacgacgaactggcgctgaaacagctggcccacgaaaaggggttgttgatgatgggaccagactgcggcaccgccattattaacggcgcggcactgtgcttcggtaacgcggttcgccgtggcaacatcggtattatcggcgcctccggcaccggtagccaggagctgagcgtccgtatccatgatttcggcggcggcatctcgcagctgattggtaccggaggccgcgatctgagtgagaaaatcggcggcctgatgatgctcgacgccattcagatgctggaagccgatccgcaaacagaaattatcgtccttgtttctaaaccaccggctccagcggtggcgaaaaaagtgctcgaacgcgctcgcgcctgccgtaaaccggtggtggcgtgcttcctcggccgcgccgagcctcccgccgatgagccaggcctgcagttcgcccgcggcactaaagacgcggcgctgaaggccgtcctgctgagcggtattaagcaggaaaatctcgatgtacatccgctgaaccaggcgctgattgctgacgttcgcgcgcagctcacgccacagcaaaagtacattcgcggcctgttctgcggcggtaccctgtgcgatgaaaccatgttcgcggtactggaaaaacacgcggatgtttatagcaacattcagccggatccggcttatcgcctgagcgatatcaatcgcagcatcaaacacaccttcctcgatttcggcgatgacgacttcaccaacggtaagccgcacccgatgatcgacccaaccaaccgtatcagtcgcctgctgcaagaagcgcgcgatcccgaagtggcggtcatcgtcatggacttcgtgctgggcttcggagcgcatgaagatccggtgggttcgacgatcgcggcgatcaaagaggccaaagccattgccgccgccgatggccgcccattagcgattctcgcttacgtgttaggcaccgacatcgatacgccgtcgctggagcaacagcgccagatgctgcttgacgctggcgtcattctggccagcagcagtaccaataccggtttgctggcgcgtgaatttatctgcaaaggggagcaagcctgatgagccagtcgctatttaaccagccgttgaacgtgattaacgtcggtatcgccatgttcagcgacgatttgaaaaagcagcacaccgccgtcacccagctcgactggacgccgccgggccagggcaatatgcaggtggtcgaggcgctggatcgcatcgccgactcgccgctggcggataaaatcgccgccgccaaccagcaggcgctggagcgcattattcagtcgcacccggtactcatcggctttgatcaggccattaacgtcgtgccgggcatgacgccaaaaaccattctacatgccggcccgccggtggaatggcaaaacatgtgcggcgccatgaaaggcgcggtcaccggcgcgctggtctttgaagggctggcgaaagatctggatgaagccgccgagcttgccgcctccggtgaaattaccttctcaccctgtcacgaacacgactgcgtgggttcgatggcgggcgtgacgtcggcgtcgatgttcatgcacatcgtcgagaacaaaacctacggcaatatcgcttataccaacatgagcgagcagatggcgaagatcctgcgcatgggagctaacgataagagcgtgatcgatcgtctgaactggatgcgcgacgtgcagggccccatgctgcgcgacgccatgaagatcatcggcgaaatcgatctgcgcttaatgctggcgcaggcgctacacatgggcgatgagtgccataaccgcaacaacgccggcaccaccctgctgattcaggcgctcacgccggggattattcaggccggttatccggtagagcagcagcgcgaagtgttcgaatttgtcgccagcagcgattacttctccgggccgacgtggatggcgatgtgcaaagcggcgatggacgcggcccacggtattgaatacagcaccgtggtgaccaccatggcgcgtaacggcgtcgagttcggactgcgggtcagcggcctgccgggacaatggtttaccggcccggcgcagcaggtgataggcccgatgtttgccggttttaaaccggaagactccggcctcgatatcggcgacagcgcgattaccgaaacctatggcatcggcggtttcgccatggcgacggcgccggctatcgtcgcgctggtcggcggaacggtagaagaagcggtcgatttctcgcgccagatgcgtgaaatcacccttggcgaaaacccgaacgtcaccattccgctgctcggctttatggggatcccgaccgcgatcgacatcacccgcgtcggcagcagcggtattttaccggtgatcaacaccgctatcgcccacaaagacgccgggatcggcatgatcggcgccgggatcgttcatccgccgtttgcctgtttcgaaaaagcgatcctcagctggtgcgatcgttacgacgtttagcgttgtagcccgggcgaggcgtttacgccgaccccgggaaatccccggcagccctacgcctggccgggcgactaccacgaccacacaataacaataaccacatcaccttctgtagcggaagccggatatgaaagaacttatcgtcgttgccattggcggcaacagcattatcaaagataacgccagccagtcgatcgagcatcaggccgaggcggtcaaagcggtggccagcacggtgctggagatgctggcttcggactataacgtggtgctaacccacggtaacggcccgcaggttgggctggatttacgccgctcggagatagcccatgaacgagaaggtctgccgctgacgccgctggctaactgcgtcgccgatacccagggcggcatcggctacctgatccagcaggcgttgaataaccgccttgcccagcgcggcgagcaaaaggcggttaccgtcgtcacccaggttgaagtcgataaaaacgatcccggctttgcctatccgaccaagcctatcggcgcgttctttagcgaaagccagcgcgatgaactacaacaggcgcatcctgagtggcgctttgtggaagattcgggccgcggctatcgccgggtggtcgcctcgccggagccgaaacgcattgtcgaagcggaagctattaaagcgctgacccggcaaggctttgtggtgatcggcgccggcggcggcgggatcccggtggtgcgcagcccgcagggcgactaccagagcgtggatgcggtgatcgacaaagatctctcaaccgccctgctggcccgcgaaattgatgctgatattctggtgatcaccaccggggtggagaaagtgtacgtgaatttcggcaagcctaatcagcaggcattgggtcgcgtcggtatcgacgagatgagccgctatatgcaagaaggacatttcccggctggcagcatgctgccaaaaatcgtcgccagcctcgcgttcctgcaacacggcggcaagcgggtgatcatcaccacgccggaatgtctgccagccgcgctacgtggcgaaacgggaacccatattgtgcatgactgacacaaaaggaagaaagaatgaataaagacaatagccgccgtgaatttcttacccaaagcggaaaaatggtcaccgccgccgccctgctggcggcaggcgcgccggcggcgtatgccgcaagcaacccgccatccgcggccacctgcgataataaaggcgcggtcaacgtcgccgataaacattactaccttgataacgtgctgctggaaagcggcttcgaatatgaaaacggcgtggtggttcacacccggaccgagcggcaaacactggaaataaaagacggcaaaatcgtcgccctgcgcagcaatctgagccacccggacgccacgctgccgcgctacgatgcgggcggtaaactgatgctgcctgccatgcgcgacatgcatatccatctggacaaaacgttttacggcggcccgtggcgctcgcttaaccgcccggcgggcaccaccattcaggatatgatcaagcttgagcagaaactgctgccggaactccagccttacacgcaggcgcacgccgagaagcttatcgacctgattcaatccaaaggctcgaccatcgcccgcagccactgcaatattgagccggtgtccgggctgaagaaccttgagaatctgcaggaagtactggcgcggcgtaagccaggctttgactgcgaaatcgtcgcttttccgcagcacgggctgctgctgtcgaaatcggaatcgctggttcgcgaagcgatgcaggccggcgcccattatgtcggcggcctcgacccgactaacgtcgatggcgcgatggagaaatcgctcgataccatgttccagattgcgctcgattacgacaaaggggtggatattcatctgcatgaaaccagcccggcgggcgtggcggcggtgaactatatggtggaaaccgtggagaagaccccggcgctgaaaggcaagctgaccatcagccacgcttttgcgctggcgacgctcaacgagcagcaggtcgatgccatcgcgacccgcatggcggcgcagcagatcaccatcgcctccaccgttccgatcggcactctgcacatgccgctcaagcaactgcgcgaaaaaggcgtcttcgtgatgaccggtaccgatagcgtaattgaccactggtcgccgtacggactgggcgacatgctggagaaagccaatctctacgcccagctgtatatccgccccaatgagcagaccctgtcgcgcgcgctggccatcgccaccggcgacgtgctgccgctgaatgacaagggcgagcgcgtatggccaaaagcgcaggacgacgccagctttgtgctggtcgatgcctcctgttccgccgaagccgtggcgcgaatttcgccgcgcaccgccaccttccataacggtaagatggtctggggcagcgtcggcacctgaagccagcgtcatgtaagaaaccccggcaagccggggttttgtcatttaccagacgcaattacttctgcggacgcatggccgggaacagaataacgtcgcggatggtgtggctgttggtgaacagcatcaccatgcggtcgataccaatccccagaccggcggtcggcggcaggccgtactccagcgcggtgacgtagtcttcgtcatagaacatcgcttcgtcatcgcccgccgctttggcattgacctgatcctggaaacgctgcgcctgatcttccgcatcgttcagctcgctgaaaccgttaccgatttcgcggccgccgatgaagaactcgaagcggtcggtgatttccgggttcacgtcgttgcggcgtgccagcggagaaacttccgccggatattcggtgatgaaggtcggctggatcagatgcgcttccgccacttcatcgaaaatctcggtcacgatacgtcccagaccccagcttttctctacctgaataccgatagattccgccagcgctttcgccgcgtcgaagttatccagatccgccatgttggtttccggacggtgtttcttgatggcttcgcgcatggtcagtttttcaaacggcttgccgaagtcaaacacctggtcgccatacggcacttctgttttgcccagcaccgtctgcgccagagtgcggaacagcgactcggtcagttcgatgaggtctttgtaatccgcatacgccatgtacagttccatcatggtgaactctgggttatggcgtacggagatcccttcgttacggaagttacggttgatttcgaagacgcgttcgaagccgccaaccaccagacgtttcagatacagttccggcgcgatacgcaggtacatatccagatccagcgcgttgtgatgggtgatgaacggacgggcggaagcgccgcctgggatcacctgcatcatcggggtttcgacttccataaagccgcgagcaaccatgaactgacgcatggtggcaaggatctgcgaacggatacggaacgtatggcgcgaatcttcgttggcgatcagatccagataacgctggcgatagcggacttcctgatcctgcaggccgtggaatttatccggcagcgggcgcagggctttggtcagcagacgcagctcggtgcagtgaatggagagttcgccggtttgcgttttgaacagcttgccgcgggcggcgataatgtcgccgagatcccattttttaaactgttcgttgtagacgccttccggcaggtcatcgcgcgcgacatacaactgaatgcggccgccaacgtcctgaagggtgacgaaagaggctttacccatgatgcggcgggtcatcatacggccagcaacagagacttcaacgttcagggaagcgagttcatcgttatccttcgcatcgaattcagcgtgcaattggtcagaggtatgatcgcgacggaaatcgttcggaaaagcgacgccctgctcacgcagcgcagccaatttttcgcgacgagttttcagttcattattaaggtcaattgcctcatcggcaccttgtgcttgttgttcagacatgttggttcctcataaccctgctttcaaactagcttcgataaattgaaccaggtcaccattcagcgcggcctgtctctggtaacacaccagagaacaatcttaacgactctggattcactacaagctgatctcactcagctatggcttcactaacggtattttttatcgttggcttccgcgcctgccagaatatccacctcctgttcacttggctgttgagttaatgtccccggtcgcgctgcgctggccggggctgcaaatcgcggcaaaggcgacaatgacaatcaccgccacgcagccgatagtccattcgcccatctgcgagaagaaatgctgataggcggcaatcgccgtgtcgctgatttgcgattcggtggtttgctgcgccaccaccccggccagccagttggcgaccgcgccggtggccaacatataaatgccggttaatacaccggtgacgccgggcatgttcagacgggttatctgcgccatcgccaccgggtcaataaacagttcggcaaagcccatcattgccagcccggcgaccatcatgcccatcgaggcctgaccatcagccgcgccgtggcgggcattcagcgccagcagcataaatccaccgcccatcagcagcagcaggccgaaagcaaatttcagccacacttttaacaccgagcgggttcgcccttccgggcggataagccacgccaggatcacgccggcggccatcaccgccaccgcgttaaccgactggaacagcgcggtcggtacttcaatattgaacagccggcgatcaacaaagtggtcgataaacaggctaatcgagctgccgccctgctgcgccagcacccagaacagcgttccggtcaacatcagcagaacgatttgccacagcgcgcggcggtgctgcggcgatttgatcatgatccgcgccaccatctgcgcggcgaacaggcagacaatcgccagcagataaccggaccagttgttttctaacagcaaggtgaagaacaccggcgccaggcacagcatcaccaccagccagccccaggtcggcagcacgaatttcaccgcgcgcagcgcctgtttatcgacgccgcgggtgtcgcggaagtagcggctgccgcttaagaaaatcatcaggccgatgaacatgccgatccccgccagcgcaaagccgatatgccagccgtaccactgcgccgccagcccgcaggcaatgggggcggcgatcgaaccgacgttaccggcggcatacagcagcgagaaaccgccatcgcgacgatggtcgtcagcggcgtacagttcgccgagcaggcagctgatattggatttgaacaggccatagccgcagataatgatcgccagcgccagatagaggctccaggtggaatcagattcgacgcccagcaccacgtggccgagggtcatcaacaacgccccggcaatcaccgccgtgcggttgccgagcaggcggtcggcaagccagccgccgagaatgggggttacgtaaactaaagatgcgtaggcgctgaacagactgatggcgtggctatcgtcaaagccaagttggtgggtgagataaaggatgagtaaggcgcgcatgccgtaaaagctgaagtactcccagatctggatcgctacgatgtagtaaatcgcgcgcggctgtgagggtgttttcataggttctccttgcagcgtgaaaaaagggaagtggcaagccacttcccttgtgtgcgtctattacttgttgttttcttctttcagcactttaacggtgtaacgaccatcagcctgacgatatgcgccgtggatatcggtttcgaagcccgggtagtgagcgccgatttcgcacagcatctgcaggaactccagcaccgggcggctttcttcggtgatcatctcaccaggcatgaccagcggtactcccggaggatacggcaggatcatgttggcgttgacgcggcctaccatctcttcgaggtacacttcttcagtctgaccgtgcagctctttctggaacgcggcatacggggtcatcaccatggatggcagcacttcgaatgcgcggaacatcaggtccggcagattgtgatgctcaaccagtttatggatgttctgcgccaggtcctgaatacgcatgttttcatagaattcaggatcttcacggtacagagacggcagcatgtttttcacccgcaggttcaggtcgaacgcgcgtttgaagtcggtcagcgcacgcagcaggctcagcgctttggtcttatcgataccgatgctgaacaggaacagcaggttgtacggaccggttttctcaaccacgatgccgtgttcgtcgagatatttcgccacgatgcttgccggaataccgaaatcatccatggtgccgtctttcttcatccccggagtcagcagcgtgactttgatcgggtcgaggtacatgtgctcgttatcgatgtttttgaaaccgtgccatgcgctatcggagcgcagcggccagcattcagcgccatcgatatgttccggctgccatacatcgaagaaccagccttcagactcgcctttcagacgtttgatctctttacggaacttgatagaacgttcgatagaaccgtcgatcaggcgtttaccggcgttaccgcgcatcatcgccgccgcggtttcggtggaagccacgataccgtagtgcggagaagtggtggtgtgcatcatgtaggcttcgttgaaggtttcttcgttaacgtcgcctttcacgtggatcatcgaagcctgagagaatgccgccagcagtttatgcgtggactgggtttcgtagatcactttcccttcaacgcgaccgccgctcatcccgcatttgccttcatagatcggcgagaagttggtgtaaggaacccatgcggagtcaaagtggatggatttcacatccagggttttcttgatgaagtcggtgttatacagcagaccatcataggttgagttggtgataaccgcgtgtaccggccaggtcgcattcggcgtctctttcacacgcttggcgatagtcgcgtgctggaactcgctctgcgggatcccgccgaggataccgtaggcgttacgggtcggacggaagtagatcggcgtaatgtcgctcatcatcatcaggtgagtcagcgatttgtggcagttacggtcaatcagcacggtgctgccggcaggcgcggagtacataccgacgattttgttagcggtagatgtaccgttggtcaccatgtagctgcgttcagcgttaaacacacgagcgatatactcttccgcttctttgtgcgggccgctgtggtcgagcagtgaacccagttcagaaaccgaaatggagatatcggatttcatggtgttggaaccaaagaaatcatagaagatgctgcctaccgggcttttctggaacgcggtaccgcccatgtggcctggggtacagaaggtatatttgccttcacgtacatatttgaacagcgctttggtcagcggcggcagaatggtgtcgatgtattcatcagtgttctgtttgattttgttcgcgatatcttcagcggcgcccagcgcatattcgaagaagcgaacctgcatgcgcagatcgttcaggctaacgtccagggtggagtaggtgttagcgaaagcgtacagcggcatgtactcgttcattttgctgatttcttcgcacagttcgagattgtatttatcccagtcgaagatcacgccgcacagacgagagttgttttcgataagttttaataagtcgtcacggtcgttcgggtagacaatacggaagtccaggcgttcgagagcacgatgcagttcacggatgggttcttctttgaagtaaacacccatgtgattcatgattgcaataacgttcatagtcaaatctccagatgtagaaagcccctcccgtctcgatgtgacaggtgatggaaggagcctcaggaaaaagggttactgattagtgcgcgttagcggggctgttgttatccgttgcgttgttctgctggcgctggtgcattttgcgaccgtagaacatcaggataatcaggctaacgatgaaggtgccggccagttcgaaggagcttgcgcccatcagcgcgatgaagcagaacacgcaacccagtaccgaacaaatcaggctaacgaagttacgaatattgatgccttcgaaacgaatcaggtcaacacaggagtagaagtaaggcagcatggtcagcagtaccgcgataccggtcagttcgccgaacaggtcagaagctttaccaccggcggagttcatcagggtaatcagcaccatcagcgcggtcattttcaccgccgccagcagcaggccttttttcgggataccgttgctatcgacttcgccatacactttcgggaagttaccgtcgttggcggcacgtacgccggcctggccaaccagcatcatccacgagcccagagaagtcaggcaagcgaaggcggtgaaagcggaaaccatcggagcagcccagccgccgagaatggtagaggcgctaatcgcgaacggcgcgccggatgcggccatctgagaagcaggatacataccggcgataacctgagtcgcggcaatatagacgataccggccatcgcagtacccagcatggttgccagcggtacggtacgtttcgggtttttcaccatcccggtactcactgcggcggattctacgccaacgaaggcccacaggcagagcaggatacttttaatgaccgcgtggctatcagtggtgctggaggtgttccagttcgcctgataagttgccgcgtcaaaccagtgccagccgacgaccgctgtcatcaccaccggaataagcaccagtaccagaccaatagtggtcagacggcttacccaggtcccgccgagcatattaacgaaagtaaagatccacacgatggcaatacaggcaatacctgctggcaccgggttatttaaaattgggaagaacgtagagagataagagacggcggtaataccgattgccaggttaccaatccagtttgcatgataataaaggacgccggtctggaaaccgaaggccggagaaatttcccctgcgtacgcaattggaccaccctgctgcgggttcttggtcgccagtcgggcataaacataagccaaagacatcgcgccaataatagaaatcacccaaccccaaatggcaataccaccgatgctggcgaggttcgcaggtaatagtgcaataccgctccccatcatattaccggcgactacgccggtacaggcaaatagcccgatctttttggcagaactcatggttgtttttctcctaagtttatttgggaggtacagatcatgatagagaaccatttattgacccgaccaactgccaacaagattactgattcgtacgagataaatcctaaagataaagtgaaataactacaaacatcagacaaatgatattttgacctttttcgattaacatataaacatgacatgttgatatcaaaaaaagataaacatcgtctacttacaaagagttagagagacatttcggtgttgaaattgtgttaccaggcaggaaaataacgcttatttcaggtaacaatcagagtgctcatgagatacataaatttaacctcatcatactcaaaaccatgagcatgatgagggtttacttattctgaagcgaggaaattgtcgagatacggtactacgcgggtgacggaggtctggaatactccgttttcaatccagtacaaggtgttttcgccagggcgtaaattaaacgccgtcaggtaggcatcggcagcttcgcggttctgtcctttcatctcataaacttttccgagcagcacgtaattcatccacgacatttctaaatcaatgcccgtgttgatcgcgctgtacgcttcatctattttccctttgcctaacatatctaccgtttttatctggtagaaaatcgccatatctttaatgccgggcattttacctactttttcaacctcggcatacagcgtcgctaattgtttttcatccaacggctgctgcgaatgacgtaatacatccaccagcgctttttcggcgtaagcataaataaagtccggcgattgtttaatgacgtcatcaagtatatcgctggctttacctaatgaatcgacatcacctttcattaacagctgatgggcctgataaagacgggttaatgaagggctttgcgcgggttgatactgtttcagcatcgctttcatgcgatccggccacggctgcattagcgcggttgacagactatccagcaggtcattctgaatggtgagctggttatccatggtaataaagtagcgtttatcgagcatcgtcgagccgtcggcgttatcgaccagttgcaccgacataaagcactgctgggcgcgatagtggcgctgattaacgaattcgatggtcaacgttttacccgaactgctgggctcgttgatgttgtagttcgttttatcgtggaccataaaggtcgagaaagtgttgagcgaggtggttaccaggctgcccaaccctaccgcataggcatgctgcgatgcccagttgttgcatgaactgccgtttaccaggtgtatgtcgatatcgcgcgggttgagcagcaggcgagttttggtttccggcggccgcgattctatcgacgacaaagcaactaacgcgacgcaactgcccaacgccagcaggaatagcgtccatacccaaaaggtggtgatccgtttacgtttttccggcactgccgccgccgctggcgcagcagatgaaggagaaatagtcggtggcgacgtttcaggaacggtgacaggggccactggcgggacaaccggcgccaactcttcgccctcttccgtacaccaaattaccgggaccgtcagcttgtagccgcgtttgggcaccgtcgcaatatattccatgctgccgtcatcaccgtctttcagtgatttacgcaactcggaaatactttgggtgacgacatggctggtcaccacgttgcgcgtccagacgtgatcgataagctcgtcccggctaagtacctcgccaggatgttgagcaaagtagaccagaagatcgattaaacgcggttcgagagtaagctgacgtccgttccggctaatttggtttacagaaggagtaacgagccattccccaacgcgaacaacaggttgttgcataaaaaaaccccaggacgaaaagggaaaggcgcgataataccacatttcgcctacctaattatgcgggtggtcaataccccacacgtttggcataagctactccctttatatacaaatcagttaacagtctatgaacatcgttgtcatttaatccaaaatagccagggtctatgctgcgtccatcaagtcgttaaggagacgcattatgttattcgaccactattccttgcaggccctatcgttaaacaaccgtatcgtgatgccgccgatgacgcgttcccgcgccggagccggtgatgtcgctaccgatcagatggcggagtattacgcccaacgcgccagcgccggtttaattatcagcgaaggcacgcagattagccaacagggacagggttatgcctggacgccgggcatctataataaagcgcagatcgccggctggaaaaaagtcacctctgcggtacaccaggcgggaggcaaaatttttgcccagctctggcacgtagggcgtgtctcccataccgtactgcagccgggcaatgccgcgccggtttcctcgtctgctattcaggctgaaggggtgaaggtctttgtcgatgtcgaaggccgcggcccggaaaacggcgtcggtgaaatggtgcagcactcgatgccgcgcgctctgactcgcgaagagatcccggctatcatcgaacaatatgcgcaggccgcgcgtaatgctatggccgccggttttgatggcgtagaactacacggtgcgaatggctatctgattaatcagtttattgattctcgagaaaaccagcgcaccgatgagtacggtggttcgttaaccaatcgcctgcgtttcctcaaagaagtcgcgcaggccgttgccgatgcgattgggaaagagaaactgggtatccgcctggcgccgctgaccaccttgatggggtcgaaagacgatacgccggaagccacctatctggcggcggccagcgtcctcaatgatatcggcatcgcctatatccatatcgccgaagccgactgggacgacgcgccggtgatgcccgccgcctttaaagaagcgctgcgccaggtgttccgcggcacgatgatttattcagggaaatacaccgtagaacgtgccgaagaggcgctggccaagggctgggccgacctgattggttttggccgtccgtttatcgccaacccggatctgccctatcgcctgcaacacaacctgccgctgaaccagccaatcagagagcagtttttcggcggtggtaaagagggctacctcgactaccctaccgtcgatgcgaagtaaacggagcaaatcgcttcatagcacttaaataaaaaacccggcagcgctgtggcatgccgggttaaaaataagactttcgacgtttatgtataattaatcaatgtgattaattatttatacacttccgccgttgcttcaaagttcggcccatgttcgcgcgccgcggtaataatataatatttaccgcccttctcatctgccagcttagaaagctgatcgtgaagatcagaaggtgaagagaattgcccgccagacggtcccacagaaatactgcccacgtgagtcagtttgaaatgcgaagcttcttctttagtaattaattgcgctgccgaggcgccaaaggcaactgctgaaagagctaaagcgactaatacctttttcatcctacattctccttggattaagccttaattgaggctctttcagtatagacacaagattaataagcgcgctatttatcagattatttttttaccatctgccacgcttagtaacgcgacggtaccccttccggacgagtcttaaaacgacggtgcagccacatgtactgttccggcgccatcaggatacattgctcaataattttgttcatccatctggcggtagtttccggggaatccagcggcggcgtcgcctctggctgcagcgcaatcagctcatacccggcgccgttgggctttcttcgcgggacaaagggaacgatggtggcttttgacattctcgccagcatccaggtaccggtggtggtcgcagcattatccacattgaaaaagggaacaaatacgctactggcgcgaccataatcatgatccggagcgtaccagaggatctcgccctctttcagtgacttaaccatgcctttcaagtttttacgatccagcatcgtcttattagaacgcagtcgtccccaggtttgcagccagtcgatcagcggattatcgtttggccggtaaacgccaatccccggcgtgaacatgccaaacatccgcgcgccgagttccagggtcagaaagtgaatgccaatcagcaaaataccctgcttctgttcctgcagttcaacgacttcgttgacgccgctggtctcggtccagcgctcaacgcgatgggtcggccagaaccatgccatgccggtttccatcaaccccatgcccagagattcaaaattcttaatcaacatttcatgacgctgcgccgggctgaggtgaggaaagcagagctcaagattgcgctgcgcaatacgtacccttccgcgcaaaaaatgcatagataaacgccccagaccatggcccagacgatagatcagcggataaggaagttgtaccaccagccacaataagccaatgcccagccatgccggccagtaacgcgggtgtaataatgaaagagagaatttgggtaaatgcgacatctgactattgctcttcaggatccttgatttttatgccagtgggaggcctcattccgaatttgcggataaggtacccgatccacaacatttagttttttcctattcgtgcggtaatacgcatacaagtgtagactataacctgtacgctgccctggtattaaacgaactgtgtaacaaatttattattaatttttggtatagcggtactcaagcttgcgttatttatcttcaacaataaataaatagccttcgaagaaacctccccgaaggctgaatattgttatgaacgaatgaaagccagcagatcggcgttaatcacatccgcatgtgacgtgtgcataccatgcggtaagcccggataaattttcagctcgctattcgctaagagtttatcctgcaaaatggcggcattcttataaggaacaacctggtcgtcgtcgccctgcatcaccagcaccggcaccgtaatcgctttcagatcgtcggtctgatcggtttcagagaaggctttaatcccttcataatgggctttcgcgctaccggtcatcccctgacgccaccagttttgaatggtaccttgcgaaacctctgcgccatctcggttaaaaccgtagaacgggccactggcaacatcgagatagaactgtgagcgattagccgcaagcgccttgcggaaaccgtcaaatacttcgatgggcgtaccgccggggttattgtcggttttcaccattaacggcggtacggaactaattaatactgctttggctacccgaccctgcggttgaccatatttagccacatagcgcgcgacctgaccgccgccggttgaatgaccaacgtgaacagcgttatgcaaatccagactttcgaccacagcagaagcatcggccgcatagtgatccatatcatggccttcgcttacctggtcggaacgcccatggccgcggcggtcgatagcgatgacgcgaaacccttgcgcgaggaaaaacagcatctggttatcccagtcatcagcgcttaacggccagccatggtggaacacaataggctgagcctctttcggaccccagtctttaaaataaatattaacgccatctttagttgttacgaatgccatatcacgaactcctctattgaaaatatgacaacttctcattaacattcaattggttacattcagcgctgatatgatgttttccctttgtttgcgaaaaacctcaatggcaacggtgccacaaagtgtagaagatgatggctcatttagctcatccctcagcaatttaatatcatcgcagaaactaaaatacgctttgtaccgtttagcgttagtgcatattacctattgataaaatacaacttttcgatacctttggttttatagataaatatcaaacagttatgaccagaaggaataattaaaatatttattccttatactcaggctttactataaattcctctcaaatacatttcttcagattatttcttgagaaaaaagaataaaccaaatgccccgcacgctcatttttaaaccactgcgtttacgccttacttaccttatccacgcagaatgtttgctgttaattgtgagccaggcaacgtcctgagcgatgcccttcctccaatactgtacaaaccgcagaaaaccgccatactcaggcacaaaacctgtgattttcaaggggtaaaatttgcctgtagcaatcccggatagcaaaacgaataagaaaggaatgactgcgatgcactacaaattggttaaacaactcaaagatgataatacattaagaaaaagctttattgatttagccatcaaaacgttcgatctatcctttgacgcctggtatcagcagggatactggagcgaatcctatatcccttacgctttcgttgataagaataaagttatcgccaacgcctccgcgaatattattgatctggtctggcaaggccaaccccgacgctatattcaaataggtacggtaatgaccaatattgattaccgtaataaagggcttgccggacagttgatacaacatatccttgatgactggcgtgacaaagcggatgcttttttcctgttcgccaactctactaccgtcgacttctatcccaaatttggctttacgcggaccgacgaatatcaatatgtggcacccgtttcgcctactcccggcgacttccgtaaactggatatggatagtgcgcaggatatcgccctgcttaagcactactaccagaaatccaaccccttttcacagctacgagtggaaaataacttcggcctgctgatgttttactgttcggcgtttatgaagcattttgtctactactcggagaaaaatcaggccgtcgccattgcgatgcaaagcgcccatgagcttatctgctttgatattttttgcgatgccggacaatccatggcgaccattatcaatgaactcgcccagccgcaatcgcaacaggcagtgctaggttttacgccgaaggaagcgcgcctgggcgagtacgaaaaaatagacggcgacgatatgttgtttatctattcgactaaaaagaacatcttccacgacaacaaattgatgttcccgctgctggcgcacgcctgatgccgggccgcaggtcatctatttaacctgcggctggtcggtgttgtttcttcctggaaaaccaaataaacagtacaattgattgttgtttttttgttaaatccaggagaagcgccacttgcccctttttgatctgcaggatctctacgcctttttagccctcagcgagcacggcagctttcgctacgccgccgaggcgatttgcatttcgcaatcggcgttaagcaggcgaattgagaagctggaaaccgctttaggggtgagattgtttgaaagaaccactcgccgggtgaccctcacgcaaaccggcagagctttcgccccaaaggcgcagcatctgctttccgaattcgaagatgccctggacggtattagcgaccgcgccgccttcggcaacgggctggtgacagttgcctgtgtcccctcagccgctaactattttatgccgcaggttatcagccaattccgtctgcgttttcccaaagcgcggatcaaggtcattgataccagcgccggaaatgtttatagcgccgtgcagaatcaccaggcggatttcggcctgagttttctctccgaaatcgcgtccgaggtggtatttacgccgctggtccatgaacgctacctggcggtttgccgacgagacgatccgctggcgcagcgtaacagcctcagctggcaagaattttttaaccacgattacatctggcttgataagatctccggcaatcgccacctgctggacgacgccctgagcgacgtagggccacgacgcactgcagtttgtgaaacccgccacgtgacgaccatgctgggtatggttgatgccggcctcggtattgcggccatcccggcgatggcgctgccggcctatgcacaccacgcgttagccagtattccactagtggaaccagaggtgaaaaggcaggtggggctgataaaaaaagcgggcagagcattacctcctctggccgccgaactcgaaaaagctattaccgatttttaccatcccaccgcataattagccctcttccggtaattcgcaggcgttggagggtaaaggatccatgcctgtgcgacggatttccgcctgcgccgggactgaagccagatagcacagcaactgcttcgcctgcgactgcgcggatgaatcggcaactacggcgcccgcgaatcgggtaacgtattgcacttcatccggcagacggccaacgaacgtcacgccgctgaccggcaacagttcgctaacctgctgaaaccctatcgcgtagtccccttttgccaccagcgaagcaacggggattttttcgatcatttttgctttggggctcgcctgcgcggcaatatccagtttgctgaacagctccttttcaacatagcgcccactggcgctatccgaataggcgatggatttcgcctgcagcaatgtttgtttcaacgcggcgacgctgctgatatccggtaccggggccccttttggcacgacggcgccaatacgtgaatccgccagttcaatacgcgaccccggcatcactttgccctgcttttgcaaatcatccagggcgtatcccaccataatcaccacatccgccttttgccctgccgccaggcggttcggtatcgcctccgcggatttccccatcgagggaccatgaatgatatgtaaggtattgccgcttttttgctgatagtcgggcgccagtttatccaacgccgcggagaagccgccggaaatcatcaccgtgatctcctgcgcgacggcaacatgcgcatagccgcaggtgaataccactaacgagaaaacccatgatttacgttgcatattcacctcttaacctaaagaattttgcgttttcaatgcctgtcgggaaacgcgttgatagagatacagcgtcgccagtagcgcgcagattgccgcaaaactcatccagtagccgggcgccgccttatccccggtgattttaattaacgcagtggacatcgccggcgtaaaaccgccaaacagagcggtagccaggctgtaagccagggaaaaaccagcgaccctgaccgacctgggcataatttccgtcagcgcggggatcatcgcgccgttgtagatgccataaataaaggagagccacagcagcacggacaacatcatggcgaagtccggcatgcgggccagcagcgataacgcaggccaactggtgaaaatagccagcagcgtcatgctgaccagcacgggtttacgaccaaacttatcggaaagcatgccgccgataggcagccagatgaaattggagatagccaccaatagcgtgaccagcaggctatccgaggcgcttaataacagcacgtttttgccaaaggttggcgcgtagaccgtgatcaaatagaacgcggtagtggtcatggccaccattagcatccccgcaatcaccacccgccagtttgccagcagaatagtcagcgattgtcctaaggtcggatgttccttacgctccgtatactccgcggtttcattcagattgcggcgtaaaaagaagataaaaggcacgatcaggcagccaatcgcgaacggaattcgccatccccactgatgcagactcgactcactgagcagcatattgagcagatagcccaatgaagcggccaccataatcgagacctgctgactggcagattgccaactggtatagaaccctttacgtccaggtgtcgccatttctgcgaggtaaaccgagacgccgcccagctccgcaccagcagaaaagccctgcagcagtcggccgcacagcaccagcgccggcgcccacaaaccgatagtctgataacctggcaccagcacgatcaggatggtccccatcgccataatcgacaacgtgccgattaaacctttacgtctgccgaccttgtcaatccaggcgcctaacaccacggcgccaacgggccgcatcaagaacccggcgccgaaaacggcgaaggtcatcattaaggaagcgaattcattttcggaaggaaaaaaagtatgggcaatataggtggcgtaaaaaccaaataaaaagaagtcaaactgctcaagaaaattccctgaggtcacctgcaggatcactttggccctggcgcgaaacactgaagtagcggcagttgcggacatcacactctccctgattaactgaatagttaactctcattaacatttaggtaaccgtaagagtgcggtaagttgtagccaggaataagcgcattttgcgcatctattgatgcgtctgacacattaataaagcctgcgagtgaagcgacgtcaacaatgacggggcgatgggttcccccttccgccccgcctctaaacactgatagtgtgaactccgctgcatttccatccccggcaatccgggcttgagcgggcgtttaacgtatatcgcgcacggcaacgtgatccatgtcgtcaaagacctggttctcgccaaccatcccccagatgaaggtataagcgcgggtacccacccctgagtgaatcgaccagcttggcgaaatcaccgcctgctcgttatgcatcacaatatgacgggtctcctgcggctgccccatcatgtggaacacgcaggcgtcctcatccatgttgaaatagaaatagacctccatccgccgctcatgggtatggcaaggcatggtgttccacaggttacccggcgccagttcggtcaggcccatgctgagctgacaggtttccagtacatccggcacgaaatatttattgatggtgcgacggttgctggtcaggttgtcacccagcgtcaccggcgctacatcggcaggggtgactttcttcgtcggataagtggtatgcgccggggcgcagttgtagtaaaacttcgccggttttgcgtggtcgacgctggtaaacaccacctctttcgcccctttaccgacgtacagcgcttcacggtggccgatttcataacattggccatcaacggtaatacaacccgggccgccgatattaatcacccctaactcacggcgttcgaggaaatagcttaccccaagctgtttaccgacttcgccacccaccgacaccccgcgctgcaccggcataacgccgccaacaataatgcggtcaatatggctgtacaccatggtgtattcatcagccacaaacactcgttcaactaaaaactcattacgcagcccctgggtatccagagttttcgcatgcgcgctgtggatactttgtcttacgtccacgttagcctccaggcagattcttgaatgacaaagccctcctgcggagggcagagattaatgacaaacctcatgcaaacattgagcttgcaaattgcaccagacaaataacaaggaaaatcaatttattgattttcggctgatgaccacaaagaaggaaaaaccacgctttttccttctttgtcagcagtctgagccctcgtgcggagggcgaaaatagattagtgatttgccgatgacaccacgctggcgccaggcgctttcaccacctgcgcgttgccaaaacgtctggcgtacagggcggtaataatcggtactaaaatcgcggtgacgatgacgcttgccgcgaccagcgccgtcgccgaagcggccaccggttcaaaggccggattaatctgcgcgatgatcaccgggttcgcgaccgccgcgcccgctgcggaagaggccgcgacgccagctgtcccattaccgccgccgataacccggtcagcaataatcaacgggatgccggtaatgatgatgaccgccacgccaagcacaatccccagcagtccggtatccagaatcacgctcaggttgatggtgttgcccagcgcaaagccaaagaacggaatcagcaccggggtggctttgctaaagaaggcgcggaagtcgtggtcgaggttacctaaggcaaagcccaccaggaatggcagcaccgcgccgataaaatggtgaggctcgaaggaagccagaccggcggagccaaggataaccatcgtcatcagcggcccggactccagcgacatcaatacaaacgcgccggactcttctttactgccgtactgattcatcaggctggcgtacagaccgccgttggtcatatccattgccgagacaatagccaacaccgacagtccggcaaagaaaccggtctggacgccgttttccggaatgaccatcgcggcgataaaagcgacgatccaggcgacggcaattttggtgatcactaacgtgccggatttacgtaatacggtaccggtggcgcgcaaatcgatcgatgcgccgatacagaaaaaccacaccgccaggatcggtaccgtgccgccaatcatacctttggtgaatgaaccaaagtaattaccggtatccggcgccagggtattaagcaccgcgcccagcagcaatggaaccagcatcatgccgccagggatacgttcaatggttgctttgatcttcattttttatcctcatctccaccccacctgaacggcaaggatgtgacttattctttcaatagcgtttgaaaaaattcttactgttcattgcattacgaacagatgagaaaagtcaggagtctcagggttgtgcgcaccacactgataccatgccgttatcattgatcatgtgaaataatgattcaacgaaaacaaaacagcgttttagttaccgtcatcacatatcaaaaagaaatcgaacgacagatggtttattgaaaacaaaagggaggtgtagccacgatgttgcggcaatcaggggtaggatgaaatgttagacagatgttttagtggattcggtgacacgtgccggacaaagcaagacacggcggtcttcgctttgcccggcctgcagatgggcgaggatcaactaccgcggtaggtagagtagccgtactggctcaacaacagcgggatatgtaacttttggttctgttccgttacgctgaaaataaccggaatgacgggaaagaaggtgctcatattatgacttttaaagtagtcaccagttttgaaggttactttatataccccgggctccatattatcggcctgcggataaagcgacttgatacggccatcggcatccgttttaccgctggcgatatgctgccagccgctgccctgctgtttatcgagctcaatctgtaccccttgagaaggcagaccggtctgctgattgagaatatgtacgcttaatgtcccttccggggccgcaagcgcgctgaagctcaacaatgaaataacggaagcgataattaacttcatgagcgatgaccttaataagcaagtgaatgtgtcatcactatagtcagcgcgatgggaaataaaattaaacttttcgttattaattaacgggtaatagcagcgcggatctacgccaaagtcttgtatgggatggaggaatcgaacgtaagagaagcgataatggcacgccctacaggattcgaacctgtgacctacggcttagaaggccgttgctctatccagctgagctaagggcgcactgagaagcaggagcttcgggaggtgcaatcgcgtgaaattatacggtcaacctccggtgagtcaatgcattttgcccggaaaagacagcagcatagcgagcttgtcgattattaacgcgatgtctggttaaggattgttcgccctttccgttcgcgactggccctctacgccgcaacggcgcagataaatagcctgtttcgcccttctcgcggcggaaaaccgataaaaacgcaaacgataactgacagcgaggctggcttctgacaaaatatccacatccccctttcgtaaagtgacagatggaatcctctctctgatggcagcaaaaattattgacggtaaaacgattgcgcagcaggtgcgctctgaggtcgcggaaaaagtgaaggcgcgcgtagcggccggaaaacgcgcccccgggctcgccgttgtgctggtcggcagcaaccctgcgtcgcagatttatgtcggcagcaaacgcaaggcatgtgaagaggtgggtttcgtctcccgctcttacgatctcccggaaaccaccagcgaagccgagctgctggaacttatcgacacgctgaatgccgataatactatcgacggcatcctggtacagctgccgctgcctgccggtatcgacaacgttaaagtcctcgagcgcattgcgccggacaaagacgtcgacggcttccatccgtataacgttggtcgtctgtgtcagcgcgcgccgcgtctgcgcccatgtacgccgcgcggtatcgttaccctgcttgagcgttacaatatcgatacctatggcctcaacgcggtggtgattggcgcttctaacatcgtcggtcgtccgatgagcatggagctgctgctggcgggctgcaccaccaccgtcacccaccgtttcaccaaaaacctgcgccaccacgttgaaaatgccgatctgctgattgtcgcagtcggtaaaccgggctttatcccgggcgagtggattaaagaaggcgccatcgtggtggacgtcggcattaaccgtctggaaagcggcaaagtggtcggcgacgtggtgtttgaagacgcggcggaacgcgcgtcctacattacgccagtgcctggcggcgtcggcccgatgaccgtagcgaccctcattcagaatacgctgcaggcgtgcgaagagtatcacgacattcaggaggcctaagatggcgaatttttctctgggcaaacacccgcatgttgaactgtgtgacctgctgaagctggaaggctggagcgaaagcggcgcgcaggccaaaatctttatcgccgaagggctggtgaaagtcgacggcgcggtggaaacccgcaaacgctgtaaaatcgtcgccgggcaaacggtgacctttgacggtcaaagcattactgtgatcgcataaacaaaaacgcccggctaaccgggcgttttttatggtttacttacggcgccaagtagtgccctgtgggccgtcttctaacacaatacccatctcgttaagacgatcgcgcgccgcatccgccgccgcccagtctttcgctttacgcgcatccagacgctgttggataagcctttcgatttcagccacttcgccatcatcggcctgcgcgccgctctgcaggaaagcgtccggctcctgctcaagcagccccagcaccgaagcgagcttacgcatatgggccgccagcgcgttcgcagccgccgcgtcttccgttttcaggcggttcacttcacgcgccatatcgaacagcaccgagtaggcttccggggtattgaagtcgtcatccatcgcttcaataaagcgcgcttcgaaggcttcgccgccggcaggctgcgcggatttgtcggtcccgcgcagcgcggtgtacagacgctccagcgccgaacgcgcctgcttgaggttctcttcgctgtagttcagctggctgcgatagtggccggacatcaggaagtagcggatggtttcggcatcgtagtacttcagcacgtcgcgaacggtaaagaagttgcccagcgatttcgacattttctcgcgatcgaccatcaccattccggagtgcatccagtagttgacgtattcgccgtcgtgggcgcaggtcgattgcgcgatttcgttttcgtgatgcgggaacatcagatccgaaccgccgccgtgaatatcaaagtgattacccagctgtttgcagttcatcgccgagcattcaatgtgccagcctggacgcccttcaccccacggtgacggccagctcggctcgccctcttttgacatcttccacaggacgaagtccattgggttacgcttgacgtcaaccacgtcgacacgagctcccgcctgcagctggtcgagatcctggcgcgatagcagaccgtagttagggtctgtcggcacgtcgaacatcacgtcgccgttatccgccacataagcgtgaccgcgggcgatcagctgctcggtgatttcgataatttcagcgatatggtgggtggcgcgcggctcgttgtccgggcgcagaatgttcagagcgtcaaaatctttatgcatttcggcgatcatgcgatcgaccagcgcgacaaagctttcgccgttttcattagcgcgcttaatgattttatcgtcgatatcggtaatgttgcgcacgtacttcagcttgtaaccaaggaagcgcagatagcgagcgacaacgtcgaaggagacgaaggtgcggccatggccgatatgacagagatcgtaaacggtaattccacacacgtacatgccaacttccccggcatgaataggtttaaattcttctttttggcgcgtcagtgtattaaaaatttttaacatcgaagattccgtgtagacgtgtgtggatataagtcgcttattctaaccctaattcaaaccggaagcagcacacattgcaaggtgcatcgacccccgcggttatgctataacagccacctatgtcatacccaaccttgggttcagcactacaatcatcggaacaggatgcaaaaatggttactttccacaccaatcatggcgatatcgtaatcaaaacgtttgacgacaaagcgccggaaacagttaaaaacttcctggactactgccgcgaaggtttctacgacaacaccattttccaccgtgttatcaacggcttcatgattcagggcggcggctttgagccgggcatgaatcagaaagcgaccaaatctccgattcagaacgaagctaataacggtctgaaaaatacccgtggtacgctggcgatggcccgcactcaggccccgcactccgccaccgcgcagttcttcatcaacgtagtagacaacgacttcctgaacttctctggcgaaagcctgcagggttggggctactgcgtctttgccgaagtggttgaaggcatggacgtggtcgacaaaatcaaagcggttgccaccggccgcagcggcatgcaccaggatgtgccgaaagaagatgttgtcatcaaaagcgtcaccgtcagcgaataattcgtggcgacactttttattgcagacctgcatctgcaaacagaagaaccggcgatcaccgccggttttctgcgttttttacagggggaagcccgtcaggctgacgccctgtatatccttggcgatctgttcgaggcgtggatcggcgatgacgatccgaacccgctgcatcagcaaatcgcttcggccatcaaagccgtcgtcgacgccggcgtaccctgctacttcatccacggcaaccgcgattttctcgtcggccagcgcttcgcccgccagagcggcatgatcctgctcactgaagaagagcggctggatctctatggccgtgaagtattgattatgcatggcgacactttatgtaccgacgaccccggttacctggcgtttcgcgctaaagtccataccccgtggatccaacgtctatttctcgccctgccgctgtttatccgccgccgcatcgccgctaaaatgcgcgccgatagcaaagccgctaacagcagcaaatcgatggaaattatggatgtgaatccgcaggcggtcgttgacgcgatggagcggcatcaggtgcagtggctaattcacggccatacccatcgcccggccgtccatgaactgctggccaacgggcagcccgcatggcgcgtggtcctcggcgcgtggcacagcgaagggtcaatggtgaaagtcagcgccgacggggtcgaactcatctatttcccgttttaatttcgccaacgatttccctgtatttccgccgacgcaaccgttttccttgccgggatatcgtggtattctctgtggcctctaaagcagtgtgaagcacacccacaggagttttcagacgcatgtcttcccgcaataatccggcgcgtatcgccatcgtgatggggtccaaaagcgactgggctaccatgcagttcgccgcagaaatccttgataccctgaacgttccgcaccatgttgaagtggtttccgcccaccgtacgcccgataaattgtttagcttcgccgaaagcgccgaaagcaacggttatcaggtgatcatcgccggtgcgggcggcgcggcgcatttgccgggcatgattgcagcgaaaactctggtgccggtgcttggcgtgccggttcagagcgcggcgttaagcggcgttgacagcctctactctatcgttcaaatgccccgcggcatcccggtcggcacgctggccatcggcaaagccggcgccgctaacgccgccctgctcgccgcgcaaattctcgcccagcatgatgccgaactgcaccagcgtctgagcgcctggcgtcaggcgcaaaccgatgaggtgctggataacccggacccgcgaggtgcggcatgaaacaggtttgcgtcctcggtaacggacagttaggccgcatgctgcgtcaggccggtgaaccgctgggcatcgccgtctggccggtcggcctggaagccgacccggaagcggtgccattccagcaaagcgtcatcaccgctgaaatcgagcgctggccggaaaccgccctgacccgcgaactggcgcgccatccggctttcgtcaaccgcgacgtttttccgatcatcgccgaccgcctgacccagaaacagttgttcgacaaacttggcctcgccaccgcgccgtggcagctactggcggataaaagcgagtggcccgccgtgtttgcccgcttgggcgacctggctatcgtcaagcgccgcgtcggcggctacgatggccgcgggcagtggcgtctacgcgagaacgaaaccgcacaactgccggatgataattacggcgagtgtatcgtcgagcagggaattaacttctccggcgaagtgtcgctggttggtgcccgcggccgcgacggcagcacggtgttttatccgctgacccgcaacctgcaccaggacggcattctgcgcgccagcgtcgccttcccacaggccaatgcgcgccagcaggcgcaggccgaaagcatgctgacggcgatcatgaacgagctcgactacgtgggcgtgatggccatggagtgcttcgtcaccgccgagggactgctgatcaacgaactggcgccgcgcgtgcacaacagcggccactggacacagaacggggcttccattagccagtttgaactgcacctgcgcgccattaccgatttgccgctgccgccgccggtggtcaacagcccatcggtgatgatcaacctgatcggcagcgatctgaactacgactggctgaaactgccgctggtacatttgcactggtacgacaaagaagttcgtccggggcgtaaggtcgggcacctgaatctgaccgacagcgataccgatcgcctgagcgccacgctggaagcgctgaaaccgctcctgccagccgaatacgccagcggcgttttctgggcgcagtcgcagcttaattaagccattcgtgccggggatttgatctatccccttccccggcacgcccttcggcgcgtagaatccccacctcgcagtaagcacatcccggttttaactcaaaaggacgacccatggaaaatgggacacactatcgcgccatcctcagcgcggatacgccgcttatcgacgtccgcgcgccggtggaatttcagcaaagcgcgatgcccgcggcgattaacctgccgctgatgaacgacgaagaacgcgccgccgtcggcacctgttacaagcgccaggggccggaagcggcattaaccctcggacataaactggtcgatggcgacctgcgcgccagccgcctcaaggcgtggctgtcggcctgcgcccgctatccacagggctatctgtgctgcgcccgcggcggccagcgctcgcatatcgtgcagcagtggctacgtgaagcaggcgtcgactatccgctgattgtcggcggctacaaagcgctacgccaggcggcaatacaggctaccgaggagctggtacagcgccctatcgtgctgattggcggctgcaccggcaatggcaaaacccagctggtttgctcgcgcccggacggtatcgatcttgaaggtcatgcccaccaccgcggttcgtcatttggccgtacgttgcagcagcaacacccgcaggcgacgttcgaaaaccatctggcggtctccctgcttaaaaaggctgaacaacaaacacgttgggtgctggaagatgaaggccatatgattggcgcgaaccacctgccggagtgtctgcgtatccgcatggcgcaatcgccgctggcggtggtggaagatccgtttgacgttcgtctggagcgactgcgcgaagagtacttcgatcgtatgcaccgcgactttattgccgcctatggcgaagagaaaggctggcacgaatatagcgagtatctgcatcacgggctgtttgccatccggcgtcggctggggctacagcgctttgctcagttaaccgaactactcgacgcggcattgttgcagcaacagcgtaccgccagtaccgaagctcacttcgcctggctggtcccgctgttaaatgaatactacgacccaatgtatcgctatcagttggggaaaaaagccgggaaaattatttttcgcggcaactggcaggaggtcgccgcctggctggcgaagtagctctcccaaccagacggcttcccgggtagcggctggcgccttacccgggctacccatggcactgggccacccattgcactggatctgtaggcccgcgcaagcgcagcgccgccgggcaatatccgcggataaggagccgtttttgcgccggatggcggctgcgccttatccggcctacggtccgtgcggcctgcctttaatttattcaccacgctgactgaaactgccggtgttgatggcctcaaaatcgctgagacgttaccggaaggccggggcagcccgcatggatgcgggctgagggccgtgatttgcaaggacgctgcctcggcccgacccgaagcctgccgggataagtcgagggaaccgcgtagcggcgattttggcggccagagcccgggagtacagagggcggcggcgactggccgccctttgtgcgctccctgcgccacggaaaacatattgcagaaaaattaaccgggagcgcaagatactctggagcgaaacgagataaacgcttttctcaagctaaaaggttgcaaaccgttaacagtatctactcccgcttagcgcagcgcaagccggggaaattcccggcttgcggcgactcatcgtcagaagtcgtagcgcagacgcaccaggttcatatcgcccagatcatcggtgctggaggtaaacacgtgctcgtaatcaacacggaaaccgtaatccagctggaaactaacacccaaaccgttatcaatacgctggtagttacggccattcacgtactccagacggtcgcccataaagtacggctgaatagatttaacagcgtattgattgatcgggaatttatagccggcaaagtattcaataccccaggcatcgccggcgaagtaatcatgcacattggttttcttggtagtcaggaagttctgataccaaccgccgccgaaggagaaggtccagttatccggagtccagctcagcgcggtaccgacaatattctggtcgtaggttttgctatcggagcttgacgggtcgcgcatctcggcgcgggtgtagttccacgcggtaccccaggtcaggtccttcatgatgtggtaatccacgccgatagacccgccgcctttacgtttgtagcgcagaccatcgcccggcagatactcgctatcttcaaacagataggatccgtacagatcgacatcaccgacggttttcttatatttcaacatattgcgtgaacgataagaaccatcgtagtcgccgttaataccgttacccggagcctgaccgatcatatcgtagtcccagatatcggttttcacgccgacgacatcatagtaaatactgttctgctgaccgtaggttaatgtcccccaggtatcgctcttcagaccggtataaagcatacgacgagtggtattgttcgccccttccgcgtagtgattgtcccaatcgaacagcgccggaatattcacgcccaattcgtagtagctgatccagctaatatcatcaaacagatagtaatcagccgcaaagcggaaacgggtgccgccgtcgaaaccgttacgcttgtaggaacctttatcgccatcgccggtcatcatgttgaactgcggacgaatactgccgccgacggtaaagttaaggcggcttaacggatcgcccgcctgcggatcttgtttcagcagcgtaatctcagcctgggatgcaaaagaagttaacgctaatgctgcgccgatcgagatcgccagcgcttttattttatgtgccatgctttttccttgagtaataagcaaccttatatttgccagttgaatattaactgcgaattagcacgacgtgttgttgggtttttaatgttttgtgcgcttaaaaatcaaggaattatcattttgtgccgttaaaataaaagcgccgcgaaattgcgcggcgcttcataaaaatgaaatctatttactggttaaattgtcggaataacgcttttccttttaataagcgtaatcccaaccatccgccgcacaacgataataatatagcgccggataatggcagcataacccacagccgccagtccggcgtccatggaaaatcaaacactttggtttgcagcatcgccagcgccacctcggcgccaatggccgccaccagccccgacaccacgccaagcagagcgaactccgcccacagcgtggtacgtagcaaggttttaccggcccccagcgtccgccagacgaccagctcctgatgccgctgacgcatcccgacctgcacctgggccagcagcaatagcacgccgcaggcggtgacctgtaccaccatgacctccagcgcgcgacttacctgcgtcaacacctggcctacctggcgcaggatggcgccgatatccagcaggctaacggtggggaattcgcgattaagctgggtcagcatcgcgttgccattatcccagcggaagctggtgagccagctttgcggctgcccatccagcgcccctggcgggaaaataaagaagaagtttggccgcaggctctcccagtcaactttgcgcacgctggtcaccttagcgttaaattgctgagtgtcgccggtaaaggtgacgctatcaccgatcctgacgcccaaccgctgcgccagcccctcttcaatcgacacctcgcctgccttcggcggccaactgccggccaccagcggattatgatccgggcgctgctcgctccaggtgagattcagttcgcgattcagcgcttcgtctttattcccttccgtcgtctgaccgttaatctgcgtcagacgcgcgcgtacgatgggataaaactccgccgcccgggtctggtgttcggcaaggaatgtcttcaccggcaccacctgttcgggagcaatattaatcaggaagtagttcgggctttccggcggcaactgctgttgccaacgctcaagcagatcaccgcgcagcaccaacagcagagccagcagcataaacgacagtgaaaacgccgccagttggctcagcgttgaccacggctggcgcaacaggcgattcaccgccaggcgcaacggtaacgctttcagcgttaagcgcttgagcaaccacagcaaggcccagcctaccagcccgcacaacagcgccagtaccagcgccccgaccaacaccgaccacagcagcgggctaccgcccatcagccatgccagtccgccgacaaccaccgcgcaaaccaccggaatatagtgttttagcggccagacgttagccgccacatcttgccgcaatacccgcagtggcagagtcgccagcagcagccggtacggccgccagccgaccagcagcgaaatcaccaccatcgcgccgatagcccacaaccacggccagccgctggcgggcggcagcgcggcgggcagcaccggtttaagcatcagcagcagggctttttccagcagcagccccatcgcgccccccgccaccacggccagcaccagcaacattagccactgaccgacgataagtttacgcagctgcgcccgcccggcgcccagcgtcttaaggatggcgaccaaatcgtagcggctgcggcagtaatggcccatcgctaccgctaccgcggcgaccgccagcagcaacgttagtaacgcggacagcagtaaaaattgctgcgagcgctccagcgatttacccaacgcgctatcatcctgctccaggccaatccagcgatgttccgcgccaagcttcggcagcagccaccgctcgtaagccgccagctgctgtgcgctacccgcgaatttatagcgccaggagacgcggctgccgggctgtaccgcgccggttttcgccacgtcggcgatattcatcattagccgcggcgccatctggaaggggttgaatccggcgtccggctcctgaatgacctcgccagcgatgcgcaaggtggcgtcgccaacgtcaatgttatcgccggttttcaggttcagtaatgccatcagccttggcgccagcaggacgctgccgcgctgcggttttaatcccgccggtgcggtctccagcgtgccgtacagcggataagtatcatcaaccgccttcacgtccgccagctgcggggtatcgccagcgaaagtcatggtggcgaagctcagctgttcgccgacggttaaccctagcgtacgcgcctgggcgagccactcggcaggcacttcgcgtgaactgcgcagggtgcgatccccggccatgaattcgcggctttgctggctcaaccctttttccatacggtcgctgattgagcccagcgccagcacgcaggccaccgccatgcttaatgccagccagacgatgagcagcgaaggcgagcgccattcgcgccagaaccagcgggctatcatgcttcctcctgcagcttgccatccaccaggcgtaagcgacgatcgcagcgcgccgccagcagcggatcgtgggtcacaagaatcagcgtggtgccgtgttcgcggttgagcgagaacagcagatcggcgattttatcgccggtgtgacggtcgagattgccggtcggctcatcggcaaacagcagcgccggacggccgttaaaggcgcgggccagcgccactcgctgctgctcgccgccggaaagctgcgccggcaaatggtgcagccgtttgccaagccccagctgttcaagcagcgcgcgcgcatcgccacggctctggctatcgctggcgccgcgcagcaaggccggcagctcgacgttctcgagggcatttagcgtcggaatcaacataaacgattgaaagacaaagcctacgtgctttgcgcgtagcctcgcgcgcgcctcttcatccatctgatgcagcggctgccccaaaagagacacttcgccgctgctgccatcgtcgagcccggcgagaatcgccagcagcgtggatttcccggaaccggactcgccaatcagggcgatggtttgcgccggtttgacaaccagctcaactccggtaaggatggacagctgatgctctccctgaccgacggatttcttaagatgatgaacttcaagtatgttttccgctggcatttgcctttcctgtttatggttctgtttacctgccgcgtaatggcggcggatacgctgttagtgcttggcgatagcctgagcgccggctatcggatggcggcgaatactgcctggcctgctctgctcaatgataagtggcaggccaaaacgacggtggtcaatgccagtatcagcggcgatacatcgcagcagggcctggcgcgcctgccggcgctactgaagcagcaccaaccgcgctgggtgctggtggaactgggcggcaacgacgggctgcgcggtttcccgccgcagcaaacggagcagacgctacgcaccgttattcaggatatcaaagcggcgaaggcccagccgctgctgatgcaaatacgcctgcctgccaactatgggcgccgttataatgaagcctttagcgcgatttatccgcagctggccaaagagttcgatattcctctgctgcccttttttatggaggaggtttatctcaagccacaatggatgcaggacgacggcattcatcctaatcgcgatgcgcaaccgtttattgccgactggatggcaacccagttggctcccttagttaatcatgactcctgaacgccgggagtcattcacaggtaaagttatgcaaaaatcggttttagttacaggatgttccagcggaattggcctcgaaagcgcgcttgatttaaagcgccagggcttccgggtactggccgcctgccgtaagggggaggatgtcgcccgtatgcaggagctgggtctgaccggtattttgctggatctcgatgatccgcaaagcgtcgaaaatgccgccgccgaggtcatcgcgctgaccgagaaccgcctgtatggcctgttcaataatgctggctacggcgtctacggcccgctcaccaccatcagccgtcagcagatggaacagcagttttccgccaactttttcggcgcccaccagctcaccatgctgctgctgcccgctatgcagccgcacggcgagggccgcatcgtcatgacctcttcggtgatggggctgatttccagccccggccgcggcgcctatgccgccagtaaatacgcgctggaggcgtggtccgatgcgctgcgcatggaactccgccacagtggcataaaagtcagcctgattgagcctggaccaatccgcacccgctttaccaacaatgttaaccaaaccggcgacaagacggtagaaaaccccggtattgccgcgcgctttacgctcggcccggaggcggtggtggaaaaagtgcgtcacgccttcgtcagcgataagccgaaactgcgctatccggtgacgctggtcacccacgcggtaggctggttaaaacgcctgctaccggcccgtgcgatggacaaaattatccagggctgagttgaagcgctgaatgtcgcccccatctaaaacagaaatcgactaacgagatacgcccatgtccgaacagaatattgtcaatattaccgaagccaacctgcagcagacgctgcagcaatccatgaacgcgccggtgctgttttatttctggtccgcccgcagccagcactgcgaacagctgacgccggtgcttgagcgcctggccgcccaataccacggtcagtttacgctggcgaaagtagattgcgacgcggagcaaatgctggcctcgcagtttggtctgcgcgcgatcccaacggtgtatctgttccagaacggccagccggtcgatggttttgaaggcccgcagccggaagaggctattcgcgccctgctggataaagtgctgccgcgcgaagaagaattgaaagcgcaagaagcgctggcgctgatgcaggaagaaaaatacgccgacgcgctgccgctactgaaagacgcctggcagttgtctaaccaggatagccagattggcctgctgctggcggaaacgctaattgccctgcagcgttccgatgaagctgaaagcgtgctgaaaaccgtgccgctgcaggatcaggacacccgttatcaggggctggtggcgcagattgaactgcttaaacaagcggctgataccccggaaatccagcaactgcagcagcaggtcgagcagaacccggacgacgcggcgctggcgtctcagctggcgttgcagctgcaccaggtcgggcgcaacgaagaagcgctggcgctgctgttcacgcatctgcaaaaagatttaggcgccggggatggccaggtgcgcaaaatgctgcaggagatcctcgcggcgcttggcaccggcgacgccctggcggcgaaataccgccgccagctgtattcattgctgtattaatcagaggcgctgacccggatagcgctacgcttatccgggctacagattacgccgtggtagcccgggtaaggcgtaagccgctacccgggaatacttacgggcgctttttcaactgcgtcacaaccaattgatggcgggcattgaagaacttccggtaggtcagataaccggcgataatcgtcgacagactggcggtcgatagcaacataaacgtgaccataatctgatacttaatcgccttcaccgggtctatcccggcgaaaatcaaccccgacatcatgcccggcaaactcaccagcccgaccgttttcgccgaatctaccgtgggaatcaacgatgcgcgtatgctatcgcggatcagccgcgcggaggccatcttcggcgtcgcgccaagacttagcttctcctgaatctgctgctgctcgctgttaaaacgctggcccatattgttgtagcacagccctaccgccaccatggcgttaccggccaccatgccggcaatcggaataacctgcatcggcacaaaggcgatcgaccccgagaagaccagcaccgccagggttagtccggcgccagtggtaatagcgataaacgatgaaacaaaagctttatcgatatatttactgcgcttcttcgcattccacgccgcgttaaagcagataaacagcaccatcaatagcgtcaacaccgcatgattgacgttaaagatatatttcagcacgtagccgacgataatcaattgcactatcgcccggcaaatactccagatgatatctttttccagcgccaatttttcccgatagctgacgacgattgccaccagcaccagcaccatcgagagcgccagcgattcgttagtaatattatgcccgttcattttttacctcctgcattttcccgccggcaggctgtagcgtgatcacttcatcagcgtgggcaatttcgttctgatcgtgagtgacccacagaatggccacccctttttccgtcgcgtagcgatgaataatctcgttaacgttgcgcttattactttcatccagcgcgctggtaatttcatcaagcagcagaacctgcggtagaaactgcaaattacgaatgagcgagacccgctgtttttcaccgccggaaagctcattaatggatttctccagcgtattatccgccagcccgaagcgttcgagatcggcaaccagcgctttaggatccggctgtttgttgcggatctgccatgggaagaccaggttgtcataaaccgaatcgccgaacagcgccggggtttgcgcgcaataagaaacctgctggcgatagttttccggcgacagcgtggcgatatctttatcgttgaaaaaaatctctccgctggtcgggctcagcagcgaggcgataattttcagcagcgtacttttgccgcatccggatggcccggtaatcaacttaaattccccggccgcaatccggagatcgatattattcaggatgaccgcgtcgtcggttttaaaaccgacgccctcgaggcgcaaaatcgcgttattttccttcattatatgtccagtttatttcctaaaacccaaacagtttactccagttttctttcaccggaacaaggagaaagttatactctgtttaaacatgcgccatttcgctgcggcgcccatcaggcaacaagacaggaggtttttgatgctgatttttatccccgttcttatttttgtcgcactggtcattgtgggggcggcagtaaaaatcgtgccgcagggatatcaatggaccgtcgaacgctttggccgctacacgcagacgctgcagccgggtttaagtttagtggtgccgtttatggaccgcatcggccgtaaagtgaacatgatggagcaggtgctggatattccttcgcaggaagtcatctctcgcgataacgccaacgtcactattgacgccgtctgcttcattcaggtgatcgatgcgccaaaagccgcctatgaagtcagcaatcttgagctggcgatcgtcaatctgacgatgaccaatattcgtaccgtactcggctcaatggagctggatgaaatgctctcccagcgcgatagcattaacacccgcctgctgcatatcgtcgacgacgccaccaatccgtggggggtgaaaatcacccgcgtcgaaatccgtgacgttcgcccgccagcggagcttatctcctcaatgaacgcccagatgaaagccgagcgaaccaaacgcgcctatatccttgaggctgaaggggtgcgccaggcggaaattctcaaggccgaaggcgaaaagcagtcgcagatcctcaaagccgaaggcgaacgtcagtctgccttcctgcaggcggaagcccgcgaacgttccgccgaagcggaagcccgcgccacccagatggtctcatcggcaatcgcttcaggcgatattcaggcgattaactacttcgtggcgcagaaatataccgacgcgctgcagcagattggcgccgccaacaacagcaaagtggtgttgatgccgctggatgccagcagtctgatgggctcgatagccgggatcggcgaactgctgaaagagagtagcggcgagcggaaaaaatcatgatcgccctgatcctcgcccatccgcatattttctggctgacccttggcgggctgttgctggcggcagagatgctcggcagcaacggctacctgctgtggagcggcgtagctggcgtcgtcaccggcctgctgacttgggctattccgctcagttgggaatggcaagggacgctgtttgccgtccttaccctgctggcggcgtggctgtggtcaaaatggctgcgtaaacgcatgaggcagcagcgccccgccgacgcacagcttaaccagcgcggccagcagctggttggccgccgttttactctcgacagcgcgctggaaaacggccgcggccacgtccgcgtcggcgatagctcctggccggtgcttgccgatgaagacctcgcggcgggcagcaaggtggaggtggtcgccgtagaagggattaccttgcgggtaagagccgccgtccgctaagcctgcgctttgcggtgacaacagccggaaagattatcaattattgggcaatccgcgctctcatcgccggggcaggcgtccgccagcgccagcagatgcgcacgcatgttttgcaactcgcggatatggttctcaatatccgcgactttctccagcgttcgttttttcacatcggcgctgtgccgcgacggatcgttgaataacgtcaccagctcgcggcactcttccaggttaaatcccacctgccgcgcctgacgcagcagcgtcagttcatcaaggtgcttctgagtgtaggtacggtagccgttatcgctgcgcagcggcgccgtcaccagccctttctcttcgtaaaaacgaatcgctttgctggttaaaccggtttttttcgccacatcgctaatattcatttttcccccttgaccttccccttgctggaaggtttaaccttcttaatactcgatgaaagagtgtgttcggtcaatcattaaccggaaattattcaggagttttttatgtctaacactatcgacctgacgcttgatggcctctcctgcggccactgcgttaaacgcgtgaaagagagcctcgaacaacgtcccgacgttgaacaggctgatgtaaccgttaccgaagcccacgtcacaggtagcgccagcgctgaagccctgattgagaccatcaaacaagccggatacggcgcggagctcagccacccaaaggctaaaccgctggcagaatcatcaatcccgtcggaagcactgacagcggccactcctgagcttccggcagcccatgacgaggatgacagtcaacagctgctgatcaacggcatgagctgcgccagctgcgtttcccgggtacaaaacgcgcttgccgcggtgccgggagtctcacaggcgcgggtaaacctggcggaacgcacggcgctggtgatgggcagtgcgtccgccgcagaattagtgcaggcggtggaaaaagccggctacggcgcggaggcgatcgaagacgatctggaacgccgcgaacggcagcaggaaaccgccatcgccaccatgaaacgttttcgctggcaggcgattgtcgccctgctggtcggcgtaccggttatggtctggggcatgatcggcgataacatgatggtcagcgacgacaatcgatcgctgtggctggtcatcggccttgtcaccctcgcggtgatggtcttcgccggcggtcacttctatcgcagcgcctggaaaagcctgaaaaacggtactgccaccatggatacgcttgtcgccctgggaacgggcgtcgcctggctatattcaatgagcgtcaacctgtggccgcagtggtttccgatggaagcgcgccacctgtattacgaagccagcgcgatgattatcggtctgattaacctcggccatatgctggaggcccgcgcgcgccagcgttcctcgaaagcgctggaaaaactgctcgacctgacgccgccttcggcacgcgttgtgacgcctgaaggggaaaaagatctgccgctcgccgaagtccaggccggcatgaccctgcgcctgaccactggcgatcgcgttccggttgacggcgtgataagccagggcgaagcctggtttgatgaagcgatgctcaccggcgagccggtgccgcagcaaaaaggcgatggcgacgccattcatgccggtaccgtggtgcaggatggcagcgtactgtttaccgccagcgccgtcggcagccagaccacgctggcgcggattattcgtatggtgcgccaggcgcaaagtagcaaaccggaaattggccaactggcagataaaatctcggcggtatttgttccggcagtggtagccattgcgctgattagcgccgctatctggtacttcttcggcccggcgccgcaaatcgtctataccctggtcattgccaccacggtactgattatcgcctgtccatgcgcattgggcctggcgacgccgatgtcgattatttccggcgtcggccgggcggcagaatacggcgtgctggtgcgtgacgccgatgctctgcagcgcgccagcgagctcgataccctggtgttcgataaaaccggtaccctgaccgaaggcaagccgcaggtggtggccgtgaaaaccttcgccagctttgatgaatccactgtcgtgcggcttgccgccgcgctcgagcagggttcaagccatccgctggcgcgggcgatcctcgataaagccgctgacagcactttaccggaggtaagcggcttccgtaccctgcgcgggctcggcgtcagcggtgaagcggaaggccatcaactgctgctcggcaaccaggcgctgcttaacgagcagcatatcgctaccgctgaactggaaagcgagatgacggcacaggcctcgcgcggcgccacgccggtgctgctggcgatcgatggtcaggccgctgcgctgttcgccatccgcgacccgttacgggaagatagcatcgacgcgctggcgcgcctgcatcgtcagggctaccggctggtgatgctgaccggggataaccctactaccgccaatgccatcgccaaagaagcgggcattgatgaagtgatcgccggcgtgctgccggacggcaaagccgatgccattaaacgtctgcagagccaggggcacaaagtggcgatggtcggcgacggtattaacgacgccccggcgctggcgcaggcggatgtcggtatcgccatgggcggtggcagtgatgtcgctattgaaactgcggcgatcaccctgatgcgccatagccttaacggcgtggccgatgctttagcgatttcgaaagcgacgttacgcaacatgaaacagaacctgctgggcgcgtttgtttataactcgctgggtatcccgattgccgccgggatcctctggccgctgaccggtaccctgctgaacccggtggtcgccggcgcggcaatggcgctgtcgtcaatcaccgtggtgagtaacgctaaccgcctgctgcgctttaaaccgaaagattagcgtaatcacaggaaaaacgggcgctgaggttactccgcgcccgttttcctggcgacaataaaaacccgcgggaaagatgacggccaccaccagatgcgctagcatgaatgcctcacacttcggagcgcgtatgggcctgttaaaccgaataaaaatgctgtggcgagccgccgtcggctcgtcttattcctggcctgcaatggatatcgtcctgcccggcgaacgttatttacacctcgtcggcagcatccatatgggcacccgcgacatggcgccgccgccggctaagctactgaaaaaaatacgtcaggcagacgccttaatcgtcgaagcggacatcaccggtaatgaaacgcctttcagtaatctcccctcttatcccccgctggctgaacgtctgagcgaaacgcaattagcagaattacgctcacgcgccggcgagctgggtttgtcggtcgatcttttcgatagccagccgctgtggcaggtggcgatggtgctacaagccactcaggcgcaaaaactgggattacggcccgattacggcattgattatcagttgctgatggctgcccgcgagagcaacataagggtgatggagctggaaggcgccgatagccaaatcgcgctcctgcgcaatctaccagacgctggtaaggctctgctggaagatacgttgacccactggcgcaccaacgcccgtttactgcaggtgatgatcggctggtggctggagcaaccgccgtcgcgcggcgcggaaacactgccgacgaccttcagccagtctttatatgatgtactgatgcatcagcgcaacatagcctggcgcgacacgctgcttgctctgccgccggggcgctatgtggtcgccgtcggcgcgctgcatctgtatggcgaagggaacctgccggatatgttgacgtaaaaaaatggccaatattgctattggcccgtcaaagaggaatttcatcattattattatcccgggatatacatcccggatcgtctgattgtcgctcaaagtgaccatcactgccaatactattgcgcaagatggtactattttttatacaaccctcacgcgcatgctggtcatacgttaggtcggttggtaagaaggattactatgactcccgccgttaaattactcgaaaaaaacaaaattacctttcagatccacagctacgaacacgatcctcaagagaccaattttggcgatgaagtggttcgcaagctggggctcaatgcggatcaggtttacaagacgctattagtggccgttaacggcgatatgaaacatctggcggtcgccgtcaccccggttgccggacagttggatttgaagaaagtggccaaagcgctgggcgccaagaaggtagatatggccgacccaatggtcgcacagcggatcaccggatacctggtcggcggcatcagcccgctggggcagaaaaagcgcctgccgacggtgattgatgctccggcgcaggagtttgccaccatctatatttccggcggcaaacgcgggctcgacatcgaactggcggcaagcgatctggcgaagcttctggacgcgaagttcgccgatatcgcccgccgcgattgagagaccggatcccggatagcggcacacgcgccttatccgggatccgttaagcgatagcttactgccagctgacttcgcccttcggctcgtaagccgccgcatccagcggcgagttcttctcgatgtactctttcagcacctcggcatcgataaagccggtattgacgtatcccggtttattatcgatgtgcgggtagccgtcaccgccggtggcgttaaagctcagcgtcgccatacggtaagttttcgccggatccaccggttcgcctttgattttcagatcgttaagcttgccatctttggcaacgaaactgacgttggcgaactgcggataagcgccggaatccggcttcatctgcgcgacggcggtcaggtactcagtcacctctttaccgctcatatcgacgtaagtcagcacgttgccgaacggctgcactttcatcacgtctttataggtaatatcacccgcttcgatagagtcgcgaataccgccgccgctcatcaccgcgaaatcagcattgctgcgcgccatctgcgccgccagcagcagacgccccatattggtttgtacgaagcgaactttgctgcgatcgccttcaagatggccgttgacgctgcctattttcacctgtaactgcgccttgcctttattctggaacggcgttaacagcgagagcatctgcgggttttcagcaatttgcggcgtatacaatacgtgctcgctctgaccgttatcccaggtgactttcttcttcaggttgaccgggatcagctgatagtgcaccagcttcatctccccgttgcggaattcaaaatcggcgcgtccgacatatttaccccactcgtgagcctgcacgatccagatgccattctggcgatccggcgcgcacggggtgccggggatataatcgacctgctttttattttccgaggccatgcagaccggatcctgcgaatggccgccgacgatcatcgccagcgatcccgcaggtaaactccgcgccatttcaacgtcgccaggcgcgttagagccgtgattaccgttgtcatagtggcccatatgggtggtcgccagaatcacgtccggcttttcattttgctgcagttcctgaatcaccagcttggcttctgccgccggattacggaattcgatatcggtgaaatattccgggttgccgattttcgccgtatcgtcggtcgttaagccaatcaccgcaattttaagcccgccgcgcttaaacagcgcccagggtttaaacaggcgttcgccggtgcttttctgatagatattggccgacaggaaagggaacttcgaccacttctcctgctggcgcagcacgctgagcgggttatcaaactcatggttgccaaccgccatggcatcgtagccaatcaggttcatgccgcgaaaatcaggttctgcatcctgtaaatcagattccggcaccccggtattgatatcgccgccggacagcagcaggacgctaccgccttcggccgccacctctttgcggataccgtccaccagcgtcttctgtgccgcaaggccatattcgccatagtcgttgcgccagaaatgaccgtggtggtcgttagtgtgcaggatggtgattttataggttttgtcctgctcataggcctgcgctgacaggctgcccagcgataaggcggcgaataacgccagcgctacgccgcgttttaaataatgcatgtttcactccctgacttaataacaagtgccgaaagtatagcgagtcagccgctttgacaaatatgttttcagaattgcgacttccttcaaaccttagggacaggtatgttagtcggataataattcaacctgcattctctacaacaaatagaactcgctgaagtgaacctatgacaaccaaccaatccgctcagtccttacccggtaccggcgcgccgccgcaaaaagcgcgcacctcatttggcatcctgggggcaatcagcctttcccatctgctaaacgacatgatccagtcgctcatcctggcgatttatccgctgctgcaggcggaattctcgttaactttcgtgcagatcggtatgatcaccctcaccttccaactgacgtcatcgctattccagccggtgattggttacatcaccgataaacgctcgatgccgtggtcattaccggtggggatgtgtttcaccctctgcggcttaattctgttagcgctggccggcagcttcggcatggtgctgctggccgccgcgctggtcggtactggctcttcggtcttccatccggagtcctcacgcgtggcgcggatggcttccggcggccgtcacggcctggcgcaatcactgttccaggttggcggcaacttcggcagctcgctggggccgctgctggcggcggtaatcatcgccccctacggcaaaggcaacgtcgcctggttcgtgctggccgcgctgctggcgatcgtcgtgctgtcgcaaatcagccgctggtatgccgcgcaacacagaatgaataaaggcaaaccgaagccggttatcgttaatccgctgccgcgtaacaaggtcatcctggccgtcagcattctgttaatgctgattttctccaaatacttctacatggcgagcattagcagctattacaccttttatctgatacacaaattcggattatcggtgcaaaacgcccaacttcacttgttcgccttcctgtttgcagtggctgcaggaacggtgattggcgggcctgttggcgataagataggtcgtaaatatgtaatttggggctctatcctcggcgtggcgccatttacccttattttaccgtacgcatcgctggaatggaccgggatcctgacggtgataattggttttatcctcgcatcagccttttccgctatcctggtctatgcccaggagctgttgccggggagaatcggtatggtttccggcctgttcttcggcttcgcgtttggcatgggcggccttggcgccgcggtgttggggttgttagccgaccataccagcatcgatctggtttataaaatctgtgctttcctgccgcttctcggcattctgacgatattcctgcctaataaccatcaaaaagcctgagtatctggcggccaaagtgaaagtttggccgccacaaccccttatcccatcagcattacgccgccatgacctgtcgccattttcctgtctgtgctttttgttgccgtaattccaatttttcgcaaatttcaataattattcataaacaaaacgagcaaaagtgtcataaactattaatcggttttttgctttaagtagcgaaaatggatcggctcaccacacgcaaggagacggaatgcatcacgcaacaccgctaatcaccaccattgtcggcggccttgtgctcgcctttatcctcggcatgattgccaataagctacgtatttcaccactggtaggatatttattagcgggcgtgctggccggtccatttactcctggttttgttgcggataccaagcttgcgcctgaactggccgaacttggcgtcatcttgctgatgtttggcgtcgggctgcacttttcgctgaaagatctcatggcggtaaagtcgatagccattcccggagccatcgcccagatagccgtggcgacgctgctcgggatggcgctctcttccctgctcggctggtcgctgatgaccggcatcgtttttggcctgtgtctttccaccgccagtaccgtggtgctgctgcgcgcgctggaggaacggcagcttattgatagccagcgtgggcaaatcgccatcggctggctgatcgttgaagatttagtgatggtactaacgctggtgctgctgcccgctatcgccggaatggtcgaaaaaggcgatgttgggctggcgtcgctggcgctcgacatgggcattaccatcggtaaagtcgtcgcctttatcgccattatgatgctggtgggccgccgtctggtgccgtggatcatgtcgcgcagcgcggcaaccggctcacgcgaactgtttaccctgtcggtactggcgctggcgctcggcatcgccttcggcgccgttgagctgttcgacgtctccttcgccctcggcgcattcttcgctgggatggtgcttaacgaatccgaactcagccaccgcgccgctcacgatacgctgccgctgcgcgacgccttcgcggtgctgttctttgtctccgtcgggatgctatttgacccgatgatcctggtcgaacagccgctggcggtgctggcgacgctggcgattatcatctttggtaaatccgccgccgctttcttcctggtacgtatgttcggtcactcgccgcgtaccgccctgaccatcgccgccagcctggcgcaaatcggggaattcgcttttattcttgccggtctcggcatggcgctggatctgctgccgcaggccgggcagaacctggtgctggctggggcgataatttcgattatgcttaacccggtgctgtttaccctgctggaaaaatatctcgataaaaccgaaacccttgacgagcagacgctggaagaggtgctggaagacgaaaaacaggtgccggtggatatctgcaaccatgcgctgctggtcggctttggccgcgtcggcagcctgcttggcgagaaactgatggcccaggggatcccgctggtggtgattgaaacctcccgcacccgcgtggatgagctgcgtgagcgcggcatcagcgccgtgttgggcaatgccgccaacgaagagatcatgaatctggcgcatctcgactgcgcccgctggctgctgctgaccatccctaacggctatgaagccggtgaaattgtcgcctcagcgcgggaaaaatgcccgaacattgagattatcgcccgcgcccattacgacgatgaggtcgattatattaccgaacgcggagccaatcaggtggtgatgggggaacgcgaaatcgcgcgggcgatgttacgtctgctggaaacgccgccggctggcgagattgttaccggttgatccgacgccccgctcgcggggcgtactcttatccacgggattaacggtcccagtaggcctcttccagactatcttcccgctccggcaggccgcgggttaaacgcggcgaatgctgattcagcacctgatagctgacgcggttggcgtatttgcacacctgcgccagcgatgagtaggtcagccatttgcatttatgtttgctggaattcggcacgttattacgatggtagttattggcggtgatatcatgcaacaacgccgccagcgcgccgtcgcctgcgccgttggtgttcatgatcttctccgggccgcccatataaggcgcgatgtgcgaatagatacgcagcggattaacgcaatcctgatggcgcatcgcgcggctgaattcatactggttgaactcggcaatcgcccccggcaggagcggatgttgcgttttacgcttcgcttcctcttcggtgaagctcgccatatagagacccgccgggcctgcggtgcacagcaccaggtcgacccagtccagcgctttatccgccgcggtgagcggatcggcgataccggtcagcgcttccgcttcttcttcattcatcgccagaatcgaaacgtgttccttgaggaactgctgccaccattgcgggttgtcagcaatcacgtatttcgttcccagcgtcagcaccaccggcacatcatgctttttggcatactcaatggctttcatcgtcgcgtccggcatcggctcgcccggcttacagcgcacgaggtaggaggtcagcaccagcgcggaagcgccggcaatcacctcttccggaatgctttccggacgcagcttgttcatgtggccaggactgatggcaaaggtacgttcgccgctatcgctaatcagcgtaaaacagcggccaatggcgccatcaacgccctgaaggtagttcagatcagtacggctggaggtattgcacaagtagcgataagcgtagccgccgatctcgatgttgctgcacatcacgccgagcagcaccgagcggtcgtccgccagcaccgaataattgtgcatggtattgccaatggtgccgccggcaaattgatgggtgatcaggccgtcgcgtaccagttcctgatacagcgcttcggcgacatcatcttcaattaccagcgaatgaccggcgctcaggccgtagcgtacgataaacgcctcatccactttcgcttcgatatccactagcgtctggtcgatgccaaccacccaggagacgttggactcattttctggctgaatttgttgcagcagcggatcgcgagcgctaacggggaaatagtgtttagatttgcgtttaccgggaaatttcatagtggcgattaaatgacagggaacaagcggggaatagtagcatattccccgctacgcgtgcgattagcgatacgacgcggtcaggttcaccatcatctcaatatgtgcaggatcggcattaagcgccggaatatactcatattgcttaccgccagcctcaaggaaaatttcccggttctgcaccgcgatctcttccagcgtttccagacagtcggcggagaagcccggacagataacctgtacgtgctgtgtgcccttctcgccaagcatttttagcgtttcgtcggtatatggcgtcaaccagggttcgcggccaaagcgcgactggaaggtcatcatcacccgctccggcggcagcccgagcactgaaaccagctcgcgagtcgttacccggcagcgctgcgggtaatcatcgccctcatgggcgtagcgttgcggaataccgtgataggagagcagcagcacatccggttcgccgtgaacggcgaacgaagcgcgtacgctggccgccagcgcgtggatatagtcagcgtcgtcggcatagtcgcggataaacgaaacgcccggaatggcgcgctttttcgcgaggatccgcgccagttcatcccataccgccgccacggtagaacacgaatattgcggatacagcggcaataccacgatatggtcaacgtcctgggccaatagctcatcgaccgcgcttgccagcgacggcgagccatagctcatccccagcgctactggaacatcgggtagcctggctgccagcgcctgttgctgttgccggctatacaccatcaacggcgagccttccgccatccacacagactgatagagcttcgccacgcggggagcgcgaatcggcagtatgatgccgcgcagtagcggccaccacagcagacgaggcgtatccactacccgtttgtcgctaagaaattgtcgcagatagcgctttaccgcatcgggcgtgggcgcatcgggagtgcctaaattggctagcaaaatacctgttttcgtctgatgcattaccgcctcttaaccatttgaatcgctgacaattgtagcgtaaatggcgttaaacggaaccaatcatagcaaaaggtagaaatgagaggtgttctcatcctgccgcagcaggatgagaaagggcttaattagccgaggattttttccagatcggcgcgcacgtcagccaccgctttggtgccgtcgactttcgcgtattgggtgttacccgcctgcgcttctttctgatagtagccgatcagcggcgcagtcatctgatggtattccaccaggcgcttacgcacggtttcttcctgatcgtctttacgggtggtcagctcttcgccggtcacgtcgtctttaccttcaaccttaggcgggttgaatttgatgtgatagacgcggccggaagcggcgtgtacgcggcggcccacgatacgatcgacgatcagctcgtccggtaccgcgaactccagaacgtagtcaacggcgatgccggcttctttcatggcgtcagcctgcgggatagtgcgcgggaagccgtccagcaggaaaccgttacggcaatcttcctgggcgatacgctctttcaccagcgcgatgaccagctcatcggtcaccagtttgccggcgtccataatgtctttcgcttgtttaccgagctcggagccggattttaccgcggcgcgcagcatatcgccggtggagatttgcggaataccgtatttctccatgatgaactgagcctgagttcctttacccgcgcccggagcgccaagcagaataatacgcattacgaaaatcccctcaaatgtcgtttcaatttttcaaaaaacgctaaaccataccaccagaacggccatggctcaaggaaggcggtgcggctgaaacggttaatggtcagatattttatgcaatctaatgtgaaatgccccgtatgagcaaatcactcagacggggcatttattccgttcccggcgtcgcgtcgctcggccgggctactcattcaggttcgcgtcaggatgccagcagctgattcatacggcggatgaactggttaggatcctccagcgtaccgcgttccgccagcagcgcctgatccagcagcagttcgacccactcgccaaactgcgcgtcgtcctgggtatcggcggcgcgtttcaccagcggatgcgccgggttcagctcgaagatgtatttcacttccggcgccgcctgaccggcagcggcgaacagcttcgccatctgggtgctcatttcgtcggcatcagtggtgacaatcgccggagtgtcggtcagacgatgcgtcagacgcacctctttcacgcgctcacccagcaggcccttaacacgctcaacgaacggctccagcgctttttcggcttctttggtggattcgtcaacttcgtccgccagcttctccagcgactcgtcggctttggcaaccgactggaacgccttgccgtcgaactcggtcaggtagctcatcatccactcgtcaatgcgatcggacagcagcagaacttcgataccttttttacgcagcagctcgaggtgcgggctgctcttcgccgccgcatagctgtcggcggtgatgtaataaatcttctcctgcccttctttcatgcgcgaaacgtactcttccagcgacacggtctgcgcggaagaatcggtatgagtagtggcgaagcgcagcagtttagcaatcgcttgctggttggaggcatcttccgccgggccttctttcagcaccaggccaaactgtttccagaaggtctgatatttttcggcgtcgtctttcgccagcttttccagcatctgcagcacgcgtttggtcagcgcggtgcgcagattacgggtgacgttgctatcctgcaggatttcacgcgacacgttcagcggcagatcgttggaatctatcaggccgcgcacgaaacgcaggtagttcggcataaactgctcggcgtcatccatgatgaagacgcgctgcacatacagcttcaggccgtgtttatgatcgcggttccacatatcccacggcgcctgcgacggaatatacagcaggctggtgtactcctgcttaccttcgacgcggttgtggctccaggtcagcggatcgctgaaatcatgggcaatatgcttatagaactctttgtattcgtcatcgctgacttcagatttgctgcgggtccacagcgcctgcgccttgttgattttttcccacgaaataacggtttcgccgtccacttcttcgcgtttttcaatctcaaccggcagcgcgatatggtcagaatatttactgatgatcgaacgcacgcgccagtcgttgaggaagtcgtcttcgccttcacgcagatgcaacgtgatttcggttccgcgatcggccttagtgatatcggcaacagtatattcgccttcgccagcggactcccaaaacacgccgttttccggcttgtcgcccgcggcgcgggtgcgcacggtgactttgtcggcaacgataaaggctgaatagaagccgacgccgaactggccgatcagctggctatctttcgcctgatcggaacccatagattcgaggaacgctttggtgccggatttggcgatggtgccgagatggtcaataacctcgtcgcggttcatcccgatgccgttatcagcgatggtcagcgtgcggttgtctttatcaaacgatacgcgtacgcgcagctcgccgtcgccttcatacagatccggctgggacagcgcgcggaaacgcagcttatccgccgcatccgaggcgttggagatgagctcgcgcaggaagatttctttgttggaataaagagaatggatcatcaggtgcagaagctgtttcacttctgactggaaaccacgggtttcttgtcctttcatgtaagtcgacctcaacaatgccatttattattaatggaaataacgtgttggggaggagatggggataggtgcgggaaatttcaagcggaggcagcgaacgccgcctccatttgttcagaaaataatcttgtggcgcccggccagtgagtgcgacaacgtggtgccgtcgaccatttccagctcgccgccaaccggtacgccgtgggcgatgcggctggcgtcaacgccatactgcgcgcagagctcagcgatgtagttggccgtcgcctcgccttcaaccgttgggttggttgcgaggatcaactcgctgattgactcggcttcgaggcgctgctcgaggcggtcaagcccgatgtcatccggcccgataccgtcaagcggcgacaggtggcccatcagcacgaagtagcggccggaatactgcccggtctgctcaatggcgtaaatgtccgctggactctccaccacgcagatctgaccgttttcctggcgacgcgggttgctgcaaatattgcacacctcctgctcggtgaaggtgcggcaatcggcgcagtggccgatttccgacatcgcgcgcgttagcgcctgcgccagacgcataccgccgctgcgatcgcgctgcagcagcgtaaacgccatgcgctgcgccgacttcgggccaacgcccggcagacagcgcagcgcttccataagctgagttaacagcgggctggtttgcatcagaacggcatcttgaagcctggcggcagctgcatgccggcagaaacggaggccattttctctttctgggtctcttcaatacggcgcgctgcgtcattgaatgcggcagccaccagatcttccagcatctctttgtcgtcttccagcaggcttgggtcgatttccacgcgacggcagttatgcgcgccgttgatggttacttttaccagacccgcgccggactcaccggtcacttccagctgcgcgatctcttcctgcattttctgcattttgtcttgcatctgctgggcctgtttcatcaggttacccaggccgccttttccaccaaacataggcttctctctcagtaagtcatcgttaaggtactgaacgccagtcagactgccgctcaaatggggcggatactctcttcatccagatcggcgtcgaagaatcgtcgcagggtctggatgttgttatccgcaataatcgcgtcgcgcgcctgcgcgagcttctcttcataaattgcctgtcgccactccagcggcgtgcgcatcgccgaattatcatcttcaacgatagtcaattcaaccggcgcaccgtacaacacgcccagcgcttcagcaagtttctgctgtgcgccggtggagttgagatgccgctgactcgggcgtaaatgcagacatatgcgattgccgtcctgctctttccacgcgttcagcgccacctgttcaaccagtttcggtaccgccaactggctcacttccgccgcccagctatcgcgctcgaccgcttccacggctagtttcgccgccagctccggcgttttttcatgctccagcgcttttttcagcgctttcggcgtggcaacctcgacctgggtttcttcaatcggggccgtcgatttccagcgataggcttctttcttcgccggggcctgctcaagcgcggccgcagccggacgagcctgtacgcgctcggtaatcgaactcagtcgttccagcgcagcgttattcaccggccgcgcgcgggatgcggctgccggttcactcttttttggggtggttgctcccggggttcgctgcagccgactgcgcgccgccagcacctggctggtgctttgcggcagattctgcggcggcggagccgatgcgaccggcggcgctgtttgctgctgcggcgcaggcgcagcggtctgcatgggcttcgcttccggctccggcagcggctgacgcggatggaaagccagcgcgcgcagcagcgtcatttcaacccccatacgccggtctggcgcataaggcagttctttgcggccaatcagcagcgtctgatagtaaagctgcacgtcggccggcggcacggtacgcgccagctcgcgcatacgtagctcgacggcggccatatccgcccccagcgccgatggcgagagctgaaccatcgcgatacggtgcagcagactttgcatttccaccagcagcgcttcccattcaacgccgcgcgaggcggcgtcgctgacgcccgccatcacgcgctcgccgtcggcggccactagcgcttctatcaaggatagcgcctgatcgtcgtcgagggtgccgagcatttcgctgacggactgcgcggttaagcggccatcgccgctggcgatcgcctgatcggtcaggcttaacgcatcgcgcaggctgccatccgcggcgcgcgacagcagctgcagcgcacgcggctcaaacgcgatctgctcttcgccaaggatgtgttcaagctgatggcggatctgttcgacatccagcgccttgaggtggaactgcaggcagcgggacaaaatcgtcaccggcagcttttgcggatcggtggtcgccagcaggaatttgacgtgcgcgggcggctcctccagcgttttcaataacgcgttgaagctgtgacgcgacagcatatgcacttcatcgatcaggtagaccttgaagcggccgcgggccggcgcgtactggacgttgtccagcagatcgcgggtatcttccactttggtgcgcgaggcggcatcgatctcaatcagatcgacaaagcggccttgttctatttcgcgacagttatcgcagacgccgcacggcgtcgcggtaataccgctttcgcagtttaaccccttcgccaacagacgggcgatggaggttttccctactccgcgggtgccggaaaagagatatgcgtgatggatgcgccctaacgataagccgttcgccagtgcggtcagcacatgttcctggccgacgacgtcagcaaaggtttgtgggcgccatttacgggctaagacctgataactcatgggctggctctgaaacgctggaaggtgaattcacgagggggtaatgctatcacagccccgccggatcggcgaggctatgtgtcgggatttgcttagtggcccgggaaaggcaccaggctaaagcaattgatgcccagtttttccaggcgctgttcaccgcccagatcgaacagattgataataaaagcggcatcgtgaacttcgccgcccaggcgacgaatcagcttcacggtggcgtcaatggtgccgccggtcgccagcaggtcgtcaacgaccagcactttatcgccttctttaatggcatcaacgtggatttccagctgatcggtgccatattcaagctcatagctttcggcgatggtttcgcgcggcaacttgcgcggcttacgaaccggaacaaagccaacgcccagcgccaacgcaaccggggcgccgaacagaaaaccacgcgcttcggtccccaccactttggtgatgccggcgtctttataacgctcggtcagcagttcaatgctaagcgcataggctttagggtcttccagcaagctggtgacatcgcggaaaaggatgcccggtttcggataatcctggacgctttggatgctgttcttcagatattcaagctgctgtgcagttgcggtcataagtttatgcctgattgaaacggtgttacccacgggcgtgcaaaatgggccaaagaaacatttgtttaacctttgaccaggcttacccgcgctcgaaaacgccagaatttactggctgtcgccaacaattgcaacaggcattattgcgcatcagtgcttttgttgctttgcgtcaaccaccggaatgcgccacataaatatcaacaggcagacgaggatcgccagcagcatgatgcgcacccacataagcttaaccagccacagagaaatggcaaaggtcagtaaaatcatgataatggctcgcggcttggcccccggcggcatcgcccggtactgctgccagtggcgaagatagccgccaaaccacgagcgatacagcagccagtggtgaaagcgcggcgacgagcgggcaaaacaccatgcggcgagcaggataaatggcgttgtcggtaacagcggtaagaagacgcccagcgtccccagcactaccgccagccagccaatgatgattaaaataatacgtggcataatgcgaatcgttatcaagcagatgtcgctactgtagcacagttgctgagtagggaatggaggagttatttgaaaacaacccggcttttacaaacgctgaaaaatcagctggctgaactggcgcttcaggtggcgccgctgtccagccacgctacgttgagcccgcgtttcgaccgccagctgttccgtacccgcgacacccagatgcaggcgtatctcgacgaagcacagcataatctcgccgagctccagcatgccgttgagcatcagcatctgccccaggtcgcctggctcgccgagcggctggtggcgcagattgccgccattagtcgtgagacggcgacctggtcgttacgccaatgggacagcgcctcgccgacgctaaaccgctggcaacgccgccgcctgcagcaccaggagtatgagcgccgcctgctggcaatgcgcaacgatcgccaacgtcagctggcgtcggcaactacccttgccgaacagcaacggctaacgaaagaggtcgaggcctatgccgggcgcctggcccgctgtcgcgatgcgctggaaaatattgaaaacgtactggcgcgtttaacgcgctaacaggagaggactatgtcgctggaaaatgcaccggacgaggtcaaactggccgtcgatttaatcatgttgctggaggaaaaccgggtcagcgcaaaaacggtgctgggagcgttggatattattaagcgtgactatgaaaacaaactgaaaaacgcccaacctgacgcgccccggtcagaagaataaaacgattcggggcggcatatgccgccccgattagcgattatgcgacgcctggcgccgtatcatcccctttattatcgcgcttcacttccgtcacttcatctcccttctcgttacgcagatgaacttccagctggttgaaggcaatatcgatattgttttcgcggcacaggcgatcgatcgagcggttaagttcgtccaccgcgtagctgcgatcgcgcagttcacgcacgtagaggcgcacttcatgatccagcgtgctggcgccgaaggtggtaaagaagaccgacggcgccggttcctgcatcactttcggatgttcatgcgccgcctgcagcaccacctctttcactttttcgagatcggatccgtaagctacgcccaggcggatcaccacgcgggtgatggtatcggagagcgaccagttgatcagccgttcagtaacgaaggctttattcgggatgattacctctttacgatcgaaatcggtgatggtcgtcgcgcggatacggatcttactgacggtgcctgagaaggtaccgatagtgaccgtatcgccgatccgcaccgggcgttcgaagagaatgatcaggccggagacgaagttaccgaaaatctcctgtaagccgaaacctaaaccaaccgacagcgccgcggccagccactgcagtttatcccacgacacgcccaaggagccgaagaccgtcatcgcgccgatggcgataatcgcgtaattgaggatcgtcgtgatggcataagaagcgccctggcgcatattaagacgcgacagcaccagcacttccagcaggcccggcaagttgcggatcagcgcccaggcgaccatcgaggcgacaatcgcaaacagcaggctacccatcgtcacgcttttcaccacgctggcgccggcttcggtgccgttgtagtgccagagcgtaatgctgtcgagataggcgaacacggttatcagatcggaccaaatcgcccagaacagcaccgcgaacaacgccaccatcaccagcatggtgatgcgcagcgtttgttggttaacctgttcgagcgcgatcgtcggctcttcctgcggttcggcgccttccgccccttctttcaccagatgctggcgacgcgccagcgcccggcgccaggcaatacgtcgcgccgccacactcaggccgcggagaacggtctggtatagcagattccacatcatcaccagatagacggtctcaatccagcggccagccagacgcagcgtggtatagaagtaaccggtcgccgtgaggaccatcagcgcgacgggcacaatcgacagcacggtcaccgtcagcaggcgcaggctgtgcgactctttgtcacgccagctttcgcggcacatcggccacaccagcaccgcaatgagcagcaggttgacgaagataacaaactgccccagcacgtcgtccatcaaattaagcggagagagctcagaaacaaccgaccagaaattcagcggcagcagcgccaggctgacgcggacgatctgccgccgccagtggctggtgagctgtgcgggcatattgaaatgcttcaccgccacgccgtctttttccagcaccttccagcacaggccgaacaccagccagaacatcgctagttttttactgtaggcccatagcaggttgctgacattcagctgcatcgtcagcaggataagcccggcggcgaggatgagcagcaccaccggcagcgctctgattaaatctatcaggatcgcttttggcgtgtttagctgagtatcattgcgtaactggcctacctgggaggccagcttagcctggtaatcacgcagccactgcaagcgccagcggatcagcccggcaatcaacagcagcggcagcccggcgaggaacgcgataaataccgccggccaggctttctcccagttgacggtgattttcatcgatttgaactgggctttcagcgcttccgggaaggatttaatccactcccaatccatcggcttattgctgttcacccagaaaatctgctgggtcaggatcgatttcagattgctggagacgctcatcaactgctgctggttaatctgcaggttgatggccatcatcagctggttccccagctgtttgttaaactggtcgagcaattctcggcgcatgtccacgacttccaacagggcgtcgtgaacttccggcgtgacttcgctgctatggccctcttccagctttgccacaaaggcatcgctctggaataacgcatcgcgctgctggttaacttcaaactgctccaggcgcagatcggcaatgcggttggtcatatcctgcagctcatccgctgatggcaatgtttgctgctgctgatagaggatacgcgacagcagcaggctgcctttcaataccgaaatctgctctttgatatcgcgttcggattgcagcgcgcggtcgagccagtttttcactctgatattgcgctgcaccagttggttgccgttttccgtcgcctgaatcagcttttcgctaagctgatggttaacttcaagctcctgcttgaccaacgggttattttggatccgcgaggtctcctccggcgagaccgcttcctgagcggttttctcggtgagggtcagccgcttgctgttcaccgcttcctgcaacagttgcagctgatgttccagccggttgctgtgggcggtcacgtaatcgcgctgtttctgcagcgtatcctgcagcacagtattgccttccaggctcttacgctgctgttcgatctccgcattcagcaaggcctgctgcgccagcagcaacccctgctgcgtcgggcgcagcgtctcttcacccggcgcggtgccgttgagacggttacgaatttgctgtagctgctgggaggcggagtacatcgcgttctgcacgcgctccggctgcgtctgcagcgagaccaattggctgttgtaggtcgccagatcgttctgcgcgctttgcagatcgtcgagcgcctgagacaccctggattcaagctgtcgcaacgataacgtgctcagggttttacgggtgacctcatcatcaggaacatcgctcagcgcattcaggctgtctaccgcctgacgcattttcgccggcgcctgttcaacctgctgacgcagttgcacagtttcagactttatacgctcaatcttatcgagcgtttctaaagtctgcgtcaggtcctgctgaactaatttttcctgcggcgtgagttctttttgcttatttagcgtagtgagctggctttgaatgtcagaacggtcaggtaaatctgcagcctgaacctggctgaagctcagagtgccaactataaggaccagtgcaaagacaatggtggaaatagcatgaggccaacgatttgtatgctgcatagtattaacatgaatggttgcaaatgccggagaataccgggggtcgtcgcagcgcgcagaatagcacttctccctgcgcgcgaatagcggcagagataagtaaaatttacctttatttacgcctgcggattcaggccatgacctcagacgaacttcgtagcgacgggcaggtctgatacatctcaatgagggcatcgacataagcacgggcttccgcatgaaggttaaaactctctggcgcaaagagccagttttccattaatccggaaagataactgcgcatcagaattgccgcacggcgagtgagtaaattcgcaggtaattgttgagcagtgatacaatcttttaatgtttgctcaatacgatcgtagctttcaagccataaactgcgctgtgcttgttggacaacggccatttctccgacaaattcgcatttatggaagatgatttccatcatcaggcgtctacgttcctctactaccgtcgcttcgaggatatagacgagtatttcgcgaacaacggacagtggatcgttagggaattttgcccgatactcaacttcgagatcgctaatgctggcgtcagagagactccatatttcattaaacagatcggatttgtttttgaaatgccagtatatgcgcccctggtcactccagcagcttttgcaatcgcggccaacgaggtagatgataccccttgctgcgaaaacaatcgcagggcgacgtcaagaatcagttgccgggtttcaagtgcctgttgtttggtttttcgtgccataggttgatgactttacagaggttgcgtttacatacatttgtgaatgtatgtaccatagcatgaccataatagaaagactgtagtgggtttgtggacgtttgagccactaaaaaatttgaaattggacactcgaggtttacatatgaacaaaaacagagggttaacgcctctggcggtcgttctgatgctctcaggcagcttagcgctaacaggatgtgacgataaaccggctcaacaaggagcccagcaaatgccggaagtcggtattgtcacgctcaaatccgcacctctacaaatcaccactgaacttcctggtcgtaccaatgcttatcgtgtcgcagaagtccgtcctcaggtaagtggcattattctgaaacgtaacttcactgaaggcagcgatattcaggcgggggtgtctctttatcagatcgatccggcaacctatcaggcaagctatgaaagcgccaaaggcgacttagcgaaagcccaggccgccgcaaacatcgctcagttgacggtcaaacgttatcagaaactggttggcaccaaatacatcagccaacaagaatatgactcagccgttgccgacgctcagcaaagcaacgccgccgtcgtcgcggcgaaagccgcagttgaaaccgcgcgtatcaacctggcttataccaaagtgacgtcgccaatcagtggacgcatcggtaaatccgcggtcaccgaaggcgcgctggtgcaaaacgggcaatctaccgcgctggctaccgttcagcagctagaccctatctatgttgacgttacccaatcgagcaacgatttcctgcgtctgaaacaggaactggcgaacggtaaactgaagcaagaaaacggtaaggcgaaagtcgaactggtcaccaatgacggtctgaaatatccgcaagagggtacgctggaattctccgacgtcaccgttgaccagaccaccggctctatcacgctgcgcgctatcttcccgaacccggaccacactctgctgccagggatgtttgttcgcgcacgtctggaagaaggtattaacccggatgcgctgctggttccgcaacagggcgttacccgtaccccgcgcggcgatgccagcgtgatggtggtcggcgaaggcgacaaagttgaagtgcgccaggtcaccgcgactcaggctatcggcgacaagtggttagtgaccgaaggtctgaaatcaggcgatcgcgtgatcgtcgctggcctgcaaaaagtcaaaccaggcgtacaggtaaaagcgcaggaagtagcttcagacaaccaacagcaaaccgccggcaacgcgaacgctcagtctgaacaaaccaagtcttaacttaaacaggagccgttaagacatgcctaatttctttatcgatcgccccatatttgcatgggtgatcgccataatcatcatgttggcaggggggctttcgattatgaaactccccgtggcgcaatatccaacgattgcgccgccagcagtgacgatctcggccacctatccgggggctgatgcgaaaacggtgcaggacaccgtgacacaggttatcgaacagaacatgaacggtatcgataacctgatgtacatgtcctcgaacagtgactccaccggtacggtgcagatcaccctgaccttccagtccggtaccgacgcagatatcgcccaggtacaggtgcagaataagctgcagctggcgatgccgctgctgccgcaggaagtacaacaacagggcgtgagcgtggagaaatcctccagtagcttcctgatggttgtcggggttatcaacactaacggcaccatgacgcaggaggatatttccgactacgtgggcgccaatatgaaggatgccatcagccgtacctccggcgtcggcgacgttcagctgttcggttcccagtacgcgatgcgtatctggatggacccgacgaagctaaacaacttccagttaactccggtagatgtcatcaacgccattaaagcgcagaacgcccaggtcgcggcaggtcagttaggcggtacgccgccggtgaaaggccagcagttgaacgcctcgatcatcgcccaaacgcgtctgacttccgctgatgaattcagcaagattctgctgaaagtcaatcaggatggttcacaggttcgtctgcgcgacgtggcgaaagttgaactcggcggcgaaaactacgacatcatcgcgaagttcaacggccaaccggcttccggtctggggattaaactggccaccggcgctaacgccctggataccgccaacgccatccgcgcagagctggcgaagatggaaccgtacttcccgtcaggcctgaaaatcgtctacccgtacgatactaccccgttcgtgaaaatctctattcatgaagtggtaaaaacgctggtggaagcgatcatcctggtgttcctggtcatgtatctgttcctgcagaacttccgcgccacgctgatcccgaccattgcagtaccggtggtattgcttgggacattcgccatcctggcggtgtttggcttctcgataaacaccctgacgatgttcgggatggtgctggccatcggcttgctggtggatgacgccatcgtggtagtagaaaacgtcgagcgcgtaatggcggaggaaggattgccgccgaaagaagcgacccgtaagtcgatgggtcagattcagggcgcgttggtcggtattgcgatggtactgtcggcggtatttatcccgatggccttcttcggcggttcaaccggcgcgatttatcgccagttctcgatcactatcgtttccgcgatggcgctgtcggtactggttgcgctgattctgacgccagcgctgtgcgctaccatgctgaaaccgattcagaaaggcggccatggcgagcacaaaggcttctttggctggtttaaccgcatgttcgataagagcacgcaccactacaccgacagcgtaggcaacattctgcgtagtaccggtcgttacctggtgctgtatctgattatcgtcgtcggtatggcttacctgttcgttcgtctgccaagctccttcctgccggacgaagaccagggcgtgttcctgagtatggcgcagcttccggcgggcgcgagtcaggaacgtacgcagaaagtcctcgacgagatgactgactactacctgaccaaagagaagaacaacgttgaatcggtgttcgcggttaacggttttggttttgctggtcgcggtcagaacaccggtatcgccttcgtgtcgttaaaagactggagcgaacgcccgggttcagaaaacaaagttgaagcgattaccggccgcgcgatggcccgtttctcgcagattaaagatgcgatggtcttcgcgtttaacctgccggcgatcgtcgaactgggtaccgctaccggctttgacttccagctcatcgatcagggtggtttagggcatgagaaattaactcaggcgcgtaaccagctgtttggtatggttgctcagcatcccgatctgctggttggcgtgcgtcctaacggcctggaagatacgccgcagttcaagatcgatatcgatcaggaaaaagcgcaggcgctgggcgtttcaattagcgacatcaacaccaccctcggcgcggcatggggcggcagctacgtcaacgacttcatcgaccgcggtcgcgtgaagaaagtgtacgtcatgtctgaagcgaaataccgtatgctgccagaggatatcggcaactggtatgtacgcggcagcgatggccaaatggtgccgttctccgccttctccacttcccattgggaatatggttcaccgcgtctggaacgttacaacggtctgccgtcgatggaaatcctcggtcaggcagcgccgggccgcagtacgggtgaagcgatggcgatgatggaacagctggcaagcaaactgccttcaggcgtcggttacgactggaccggtatgtcctatcaggaacgcctgtcaggcaaccaggccccggcgctgtatgctatctcgcttatcgtcgtcttcctgtgtctggcggcgttgtacgagagctggtcgattccgttctccgtcatgctggtggtaccgttgggtgttgttggcgcgctgttagcggcaaccttccgcgggctgactaacgacgtttacttccaggtcggcctgctgacgaccatcggcctgtcggcgaagaacgcgatacttatcgttgaattcgccaaagacctgatggaaaaagaaggcaaaggcctgattgaagcgacgctggaagcagtacgtatgcgtctgcgtccaatcctgatgacctctctggcgtttatcctcggggtcatgccgctggttatcagctctggcgcaggttccggcgcacagaacgccgtcggtaccggcgtaatgggcggcatggtgaccgcgacggttctggctatcttcttcgtgccggtgttcttcgtggtggttcgtcgccgcttcactaagaaaactgaagatattgagcataaccatccggttgagcatcattaatcttgcttaagttaagggccgcatttgcggccctttttctttaggggtatttaaacgcacacattgttattgtttattttacgttctgacatataatatacattgatgaacgttgttctatttttattaagatttcgattaccggttttgtcatcaggtctcattcagaatattcttaattaccaacaatctcccgacaaccttctcgctgcaggcaggcgtcaatcagataaacttatgatatataaggctgaccttccagtttcgccaaacataaaaggaatcagtataataggtcctgtttttttaagataaattaaccgtatttattgtaatttttcgtaatagcacggtgaaatgtttttgagactggattatagttaaatcacaggattacaatgtttgagcctggtcttcatcccacaacggtgtttgttagtcgtcgtttaaaccacttacaaggggatgtgttatggacgagtactcgccaaaaagacatgatatcgcgcagctaagatttctctgcgaaacgttgtatcatgactgccttgcaaacctggaagaaagcaaccgcggctgggttaacgatcccacctcggcggtgaatcttcaattaaatgaattgatcgagcacatagcaacttacgcgcttaattataaaattaagtacgctgaggataataagctgatttctcagcttgatgaatacctggatgacacttttatgctgttcagtagctatggcataaacacaagcgatctccaaaaatggcgcaaatccggcaatcggttattccgatgctttgtgaacgccagccgggagaacccggcaagtctttcttgttagaattattacattcaaaaggtgaaatgatgtctggtaaaccattaactaaaacagactatttgatgcgtttacgccgctgtcagacaattgatacgctggagcgcgtaattgaaaagaataaatatgaactttccgacaatgaattggcggtattttactcagcagccgaccatcgtcttgctgaattgaccatgaataagctatacgacaaaatcccaacttcagtatggaaatttatccgctagttcattttctgtcattaatacaaccgcgcctcaacagggattactcgggatattaaacgcctgagtcccgtattgctgcatatgaaaccggtttcgctttatactgttttttctttaaacaggagaagaccatgagcgaagaaaaaaggaaaatgatcgccggcgaaccttaccttgctggagacgccacgctaaaagcagaccgcctgcatgcccggcaggtgctgcaccgctacaaccactcagcaccggatgagcgcgaatcgcgcgccgctctgctggctgaactatttggtaagcccactgacgcgtatatcgaacccactttccgctgcgattacggctataacatcagcctcggcgccaatttttacgcgaactttgactgcgtgatgctcgatgtttgcccgctccgaattggcgataactgtatgctggcgccgggcgttcatatctataccgcgacccatccgctggacccaacggaacgcaacagcggtatcgagtatggtaaaccggtaacgatcggccacaacgtatggattggcggccgggcggtcatcaaccctggagtgaccattggcgacaatgcggttattgcctccggcgcagtggtggtgaaagacgtgccggccaatgcggtagttggcggtaatcctgcccaaatcatcaagctgctattaaccgaaaaatagtaactgttatgcttttctgtaactgatctgttactttaaccccggtctccggcaacataaaataactgtcagactgagccgtagagcctgaaatgccgggctctacgaagaattcggggactaaaatgacagaaatacagcgcctgctaaccaataccatcgaggaactgaacgaaaaagaaaagcgcgataatcgcccgcgttttagtatcagttttattcgcaaccatccatggctatttgtcgctatgtacgccgcctttttggccactctcatcgtcatgctgcgctctgagacgttggtggattccgtgtggctgctgatcgttctgtttgttctgctgaacggctttttcttctttgacgtctacccgcgctaccgttatgaagatatcgatgtgctcgattttcgcgtctgttataacggtgaatggtataacacccgtttcgtccctgaacagctgattgacggcattctgcaatcgccacaggtcgcccatgagcagaaagctcaactgcagaaaatgatcgcgaccaaaggtgaactctccttctacgatgttttcaccctgacccgcgttgctgcctgattagcctgttcaacgtccgcagcgccggtacgaaatgcgccgcggacgtattgccataccccagaaccaaaccgctacgcgccttatgcgggttaagataaaagcggctaagcgccgctggcgccatttgatactgacgcgcctgctcgacaatttgcacatcgtcaatgtcatcgacggcaaccgttaaatgcagcccgccctctcccccccaaatctcattcgccagcgtgaattcgcttgccacagcctcgcgtaactgctgctgacgccgacgatataatcggcgcattgaagccagatggcgcgcataatggccctcttcgatgaacagcgccagcgcacgctgttccagacgatggccgccgcgcagcagcgcgccgatcgctccctgagccgcctcggccagcgccgacggcatcaccgcgaagcctattcttaatgaaggaaatagcgttttgctgaaggtaccaaggtaaaccaccggcgcctgcgccaccatgccgagcatcgcctgaatcggctcgccgctgtagcgaaactcgctatcatagtcatcttccacaatccacgcgtcatgctggcgggcatattccagcaatgccagacgacgtccggcgctcatcaccgccccgctcggatattggtgcgaaggcgaggtaaagataagccgcggcgctacctcgttaacgctatcaggacacatgccatcaccgtcaacaggtatccccttcagctgtaacccggctttaataaacacgcttttcgcgccgaaataaccgggctcttcaacccaggcagtatcccccgcgacgctcagcagatgcgtgcaaaggttaacgccctccagcgcgccttcagtgatcacaatttgccgcgccgtgcagcgtatgccccgggataaagtcagatgacgggctatcgcctcgcgcagcgccggttcaccggccgcctccccgtatccaaggatcgtgctgccatcctcgcgcagtacccgatcgagcaaacgacgccagatagccagcgggaagtagttcaccgcgggcattccggtagtcaacaacagcgccggggagtcccgtcgacccggcagcggtagcgtgcgcaagcgctcaggcaaaacaaacgctggtggcgccggctcgctttccgccagcgtattgagcgctgccacatacgtcccctgacgactgcggatcagatatccctcaatcgccagctgttccagcgcgctgtttacggtattgcgcgatacgccagcacgctgcgcaataacgcgcgcgcccggcaaccggctatgactgagtaactcgccctgtaaaatagcctcgcgcagcgcctgatagagcgcgcgctgtagcgtcgcgtctccccgttgctgtatcccgcgcgtcagcagggcaaaaaaagcatcgtccggaatattcatcatggctcctcgtggcaccctaaaaagatacctttatggccctttttatggaaccagcagacgtttaatctcaggactcttcccgcaaacaggacttgaccgatgacgcaatacaaccaattcaaccaactcgttggcgacgctttacctgactggcagccacgcccctggccgcagcgccagaccttgcaaggacagttatgccgcctggaaccgcttgacgtcaaacacgcgcaagcgctgttcaacgcctatcgacaggcgcctgatacccgcgcctggacctggcttttgcgtgaaccggaaaacagcgttaccgagttcagcgcctggattgccagcatcagcgagctaaacgatccgcttcacttcgcggttattgatgaacgcagtgggcagccggtcggatcgttagcgctgatgcgtattgacagcaaaaacggcgtcgttgaagtcggccatgttcacttttcgccgctgctgagccgcaaagcaatggccaccgaggcacagtggctgctgatgcgttatgtctttgagtcgctcggctaccgccgctatgagtggaaatgcaatagcctgaatgaaccgtcgcggcgcgcggcgctgcgcttaggtttccagttcgaggggcgctttcgacaagcgctggtgataaaaggccacaatcgcgataccgactggttttccattatcgatagcgagtggccagagatagatagcgcaatgcgccagtggctggccgccggtaattttgatgccaacggccagcaataccgcacgctggaaagctttcgcaaaccaacgaattaacggcgttttttacgtccctgcaccgccttaaagcgcgggttacttttgcagataacatacagccgccctttgcgtttcactatctggcaatccgggtggcgctgtttagcgctacgcaatgagttcagtacctgcatgtttagctccttttcgcatcaataaaaccaccgaagcgctggcggaaacgagcggcgctgccttcggtagcatgtgttttctgcttaccggtgtaatacggatgggatttagacgaaacatctaaggtgacatacggataggttacgccatccagttcaatctcacgctcggttttaatagtggatcccactttgaagtactcgtttacgctcgtatcgtgaaaaacgacggtacggtagtgcggatgaatattagctttcatggcaaacctcaatttatatgttataacataacaataaaagtacaccgttgaccgccaaagatcaaccacaggaaattcacggtttcagcgggaaccacgcggtggctcagagggcgatcatttgcccccttctcccgaatcgcaatattcgcgacccgagtctttttttcgctttcgcgtatactcagagcaattccccgtaaaataaggacatacccatgacgacacgccatttaatgagtctggttacaggggtgcttattctcgccatcgtgctacccatcgccttaagtatctggctggcaatgcgccaggcgcaggcgcagttttatagcgagctcgaccactactcaaaacgcattgtcatgcgcgtagaacaagtcgccgctcaggccaaagaagcattacaagaagccgatgcgcacagcgccagtgcctgttcaccagaacatttgctgaatatgcgccgtattgcctacacccatcgctatgtgcaggaagtactctggttgcgtaattcggtgccgatgtgctcatcgcttgaggatcaccaggtctcggtgacgtttccgcagcccgaccacgtcaccgccgacggttacagcacctggcttacctcaatcaacgacctcggcctgcaacatcgcatgaccgcctttggcaacaaaaatcatattgtgatgatcgacccggtgtcgtttattgatgtcatcgccaccggtcaggaaaagatccacacgatattattcggcaccgagcacgatcaggtggtgatcagtagccaaccgatcgatcccgcagtttggacgcgaattaaaaacctccatagcgagacgctaacgctgaatgacaccgtctatcgcgtgcatatcatccctgaactgggtcttggcgtcgccagttggtcgtccacgcagccactggatgcgcgccttcgccagcagctgctgctatggctgccgatagggctctttaccagtctgttgacctcttttttacttctacgcctgctgcgcagattacgctcgccgcgttatggcatgctggatgcgctacagtcagatgccattcaggtttactatcagccgatcgtctcgctggaggatggcaaaatcgccggcgccgaagcgctggcccgctggcagcagccggatggcacttttttatcgccggatatttttatcccgctggccgagcaaaccgggctgatcacccggttgaccgaggatatcgtgcgtaaaatctttgccgacctcggcccctggctgcgccatcatccgcagatgcacatctctattaatctgtcggtggatgacctgcgctcgcctacgttgccaacactactcaaggaacaactggcgcgctggggaatcaatgcggaacagatctcccttgagcttaccgaacgcggctttgtcgatccacaaaccactctgccggtgattattggctatcgccaggcgggacaccggatctcgatcgatgatttcggcaccggctattccagcctcagttacctgcaaacgctggatgtcgatacgctgaagatcgataagtcttttgtcgataccctggaatataagccgctgacgccgcatatcattgagatggcgaagtcgctgaatctggcgattgtcgccgaaggggtggaaacgcccgctcagcgcgactggctgcgcgcgcatggcgtcaattacgcgcaaggctggctgtactgtaaggcgctaccgaaagaggaatttattcagtgggcggaacataatattaaaacgcattaataccatgtgcggcgcgctggcaaccagtcgcgccgccggatttactcgtcaagaatcggcgcaaacccgccgaagatcatgcgcttgccgtcaaatggcaagctatcgctaagcgctttgatccgcgggtcgctcatcattttcgcattggccgcatccctgatctccttagacgggtactcgatccaactgaaaaccacttcctcatccgcctgcgctttaaccgacatgcggaaatccgtcagctttccttccgggacatcatccgaccaacactccacgacgcgcgtggcaccaaactctttaaacagcggcgccgattttgctgccagttcgcggtatgcctccttattttccgcagggacggcaacgacaaaaccatcaacatacttcatgagtgagtctccgaagtgaacagcgccggcggcatatccgtcggcgtctgagtgataagtttagtcgctgctatcgcgaacggcgatttcaggacgccagcccccggcttttcgccgccgtactgactgctcgcggttgacggaaccagggtaaaaacagctggatcagcgggccgatagcaaaggcgtaaaccacggtgccaaccccgactttgccgcccagcagccagccaatcagcagtaccgagacttcgatagcggtacggataccacgcaaagaccagccggttcgcgcatgcaatccggtcatcaagccatcacgcggcccgggaccaaaaccggcgccgatatacatcccggttgctatcgcattcatcaccaccgcgccggcgagtagcagactacgcgcgggcagcgattccagcggcggaagtaccgcgagcgtggcatcggccgcaaggccaagcacgatgacattgctaatggtgccgagacccggcatctgacgcagcgggatccacagcagcagcaccgcggcgccggtcgcaataatcaccgtaccgaaactgatattaagctgtttcgccacccccagatgaaacacatcccacggatcggccccgaggttggcatggacgaataacgccgtcgacacgccatagagaaccagaccaatataaagttgtagcaaacgacggaccataaacacctcagtatgtattgcgaacacccccatcatcagcgaaaatggattggtaattaatggccagttttttaaaagtggatcgctatgtcagtacgtcgttttggaacacaatcgctggcacgcctgctcggcaactggcaatccccttcctcgcgcgcgccgctgtggcggcagctggcagaagcgctgcgtctgttgatccttgatggacggctggcgctggagacccgtctgcccggcgagcgggaactggcgacggcgctaaatgttagccgcaccactatcgccagcgcgctggggttattgcgagaagaaggctatctgcaaagtcgccagggaagtggttcacgcattgcgctacctgccggccctctgcaccccggagagcagacgctttcggcaccatcggtcaatctcgccaccgccgccctcagcgccggaccggagattcatcaagcctaccgccacgcgctgacgctgatgccgcagtatttgtcctataccggctacgatcagcaggggttagtcgatttgcgcgcaatcattgcccgccgctatagcgaacgcggcctgccgacacaggcggatgaagtgatgattgtgaatggcgcgctgagcggatttgccctggtactgcgtctgttaaccgggccaggcgatcgggtggtagttgacgcgccctcttacccgatggcgattaacgctattcgcggcgcctcctgccgaccgataggcgtctctttaccggaaaagggctgggactgcgacggcctggcggcgaccattgcccaaacttcgccgcggctggcctttatgatgccggattttcataatcccaccggtcgctgcatggatagcgaaacccggcagcgcgtcgccgatctggccgccagcacgcgaacgacgctggtcgctgacgaaacgatggtcgatttatggtacaacgccccaccgccgccgccgctggcggctttcacccctgaagcaccgataatcactattggttcagcgggtaaaacgttctggggaggactgcgaattggctggatccgcgccccggcacggacgattgcctcgctcatccaggcgcgggatacactcgatctcggttcgccgctgctggaacagctggcttgttgttggctactggagaacgaacaaacactgttgccgcaacggcgggcaatgctggccgcgcgtcgtgatatgtgcgctgcgttgatggcggaatattttccccactggcgcttttgcgtccccgagggcgggctatcgttttgggtggagctgccggagatgttggcaacgcagttttcggtgcgcgctgagaatgccggcattcatatcggtaccggtacacgattcggtctggaaggtgccttcgaccgttatttacgtttgcctttcacgctgccggatacggaattgcgcaacgccttcagcattttacaaccgctgtggcagacccttacgcaacagaaagaaatggcgagaacacgtaaaataatataataaaatatcgacgggctgggatcagcccgtcaaaaaccaccatccatgatgaatatgagatgttttataaaattgcagtaccatcttgcccacgccgcatgtcattacgatgacaaccgcgtagtcatttcattaatgctggcgcggaataggaaaaccttttagcgaaataataaagccatcgtcatcttttttaatttttgcgccggtttcacaccagtcggaagcaatgcgaaaaaactcatcactaccgatattccagttcaggcgcacgtgcttaacgtacccggaacgcagcaggtcacaggcttcactgtaactgctggctgtagagaattgttgtttcatcttttcttcttcagaagtttccgtaatgctttgatttctttaggggttaacggcgacgcttcctcttcggtatgctggttatcaatatcctcatgcgaaacccccgcctcgtctgctgaatcaatggccgcaagcgccaattgcagcagcttctccgtagccgtgcctaaattctcgttattcacttccgcataatgacgcagtttatcttttaactctgcgtcaattttcacattcagaactactgtggtcatgatcacgcttcccgtgcaataaaatcatcataattaatacacgaagttaacatcttgatccagagatattatttatccttaataatatctggtaattccatgaaataatttgcccattatatatgacatgaaaatgacattagtatgtcattattatttcatatttatgacaatacaaaattaaggtataaaaaagagtcgttttagtaacgtaaaacaataaataaagtgaagctgcctataatagtagcagagaataaaagcacaacaaatgaagggattttaaatcaggaccgcctgaattgggtgggggccctgccagctacatcccggcacacacgtcgtctgctctggctgcttccttccggacctgacctggtaaacagagtagcgttgcgggagaaccaacagagcccccattgagagcgttgataaccaacgcgctggcgcattatccctatagcactcctgaattgcaagccactcgcgtccagctgctggtttattacgcaaaacgttggatttcacagcaaatagtgccttcacaaggccatacgtcccagcaatgaaaaagattgcgagccccatcgcggcacactttaccgcaacccgccatacttattcgtcctgtatcttttcaacgtgtagccgctacggtaatcgcatgactcaatcgccacgccccaccaccaccttgcccatgcccgccattgatggcgtaaccgtaccctttcacggcatgaattttctacgccccgagctgctgctggatttcgtcagcgtcagtcccgcgccgttgttatcagtgacccccgtcgccctgctcttttccacggtgggcgtgttgcaacacgtcgagctgcgtaagctgcccgttgaggtcaaaggcaaggtggtttatcccatttcatcactcaaatacccgacgctgcgcggcaaactgattatcaatgcgcaatcacagcggctgaaatttcttgaaagcctgatcgctaccagcccgcatgacaatattcacggtatgcagatcctcgggctggcgctggaattcaccgtcctttgacagctgtacagcacgcgggctagcgcttattctgggcttttctcgcgcgaaggagtgatgatggaggacgcccacgacagctttccccagcgggtctggcagatagtcgcctcaattccggaagggtatgtcaccacctacggcgatgtcgctctgctggcgggttcgccgcgcgcggcgcgtcaggtgggcggcgtgttaaagcgcctaccggaaggctcaacgctgccatggcaccgggtggtgaatcgccacggcgatatttcgctgaccggccccgacctacagcgccagcgtcaggcgctactggcggaaggcgtccaggtctccggcagcggtcatatcgacctgcaacactatcgctgggtttattaagggcaaaaaaatgcccctgaacaggggcatggagacgtttattgcgccatcggcgccatatcattagccaccggcactggcgcatgctgcaccggcaccagcaccagatcggcgcgattaccgccctgggttaccacggtctgcacggtatcggtgataaacatcagctggccatttacggtaatcgccgaactcagcaggatccgcgcgttcggtttgatatccgcctggttgtaaggcagcacaaagttgaacggcgcctgcttaccttcagtacggaccgctttttgcgacaatacacgcgctggcgcatcggcaagcgacgcatcggacaacgtcacggtcagtaccgcatccggcggtaacgctacacgttggcgaatattgatagtcccggaaacattaggctgttgctgcgaggagctcagtgaggcaatgccgtaaggatcgggtgccgtcgtctgatgagcggcgttgctgttcgggttattcgcacaggcggataatgccgcagcaacggcgatagcacttaacatataggcaaatttcattatgttctccttttcatccctttagtcacaggagtacgtcctgccatcacgatggctaagacattagtatcgtgaataagtgtggcacagatctcagaataattcccggaaaggggcatttattcagattattacacccatcggaccacttgagattccaggttatacttgccctcaatatgcgctgcgtcagcgccgctatcaataattgagggtatctatgagtcaggctctaaccaatctgctggcattattaaatctggaaaaaattgaagaagggctgtttcgcgggcagagcgaagacctcggcttacgtcaggtcttcggcggccaggtggtcggtcaggcgctgtatgccgccaaagaaaccgtgcctgaggaacgcctgattcactcctttcatagttacttcctgcgtcccggcgatagccaaaaacccatcgtttacgatgttgaagtgctgcgcgacggcaatagcttcagcgctcgccgggtggcggctatccagcacggtaaacccatcttttacatgaccgcctcgttccaggccccggaaccgggctacgaacatcaaaaagcaatgccggcagccccgtcaccggaaggcctgccctctgaaaccgatatcgcccgtaaactggcgcatctgctgccgccgcaggcgaaagagaagttcctcagcgataaaccgctggaaattcgcccggtggagttccataacccgctgaaaggccacgttgccgaacccacccgccaggtgtggatccgcgccaacggcgtagtgccggatgatattcgcgtccaccagtcgctgctgggctacgcgtctgattttaatttcctgccggtagcgctacagccgcacggcgtcggcttccttgagccgggtatgcaggttgccaccatagaccactcaatgtggttccaccgcccgtttaacatcaacgaatggctgctatacagcgtcgaaagcacttccgcctccagcgcccgtggttttgttcgcggcgaattctatacccaggacggtattctggtcgcctcgacggtgcaggaaggcgtcatgcgtaaccgcaataactaattcgcgacgggcccacaacgggcccgcttacctttaacggccaagcagttcgcgcgcaccggcaataaaatcacccaatagcccgttgcgactctcccgccgccagcacagcgtaagcgtcgtcacggcaaaggtctcttccagcaggcaatagctgacctccgacaccagcatggcgctttgcgtctcgggcaccaacgtcacgcccattcccatcgatacctggcctatcgccgtggagacatcacgcgagtactgaatcttacggggcgtaaaacccgcctgccgacaggcgctgatggctgaccaacccagcccgacgccgcaaggatcttgctgaataaaaaacgtctcttccgccagcgccgcgagtggaatagcgcgccggctggcgagcggatgatggcgaggtaccaccgccaccagcggccgggtcgcaatatccagcgactccagttcatcatattgcgcccctggcgagcgaataaacgccaggtcgaccgtttcgcttaatagcccggttatcaggtcgttaacgttatgctcttcaatcagcagatcggcttcaggtttacgttgacgataatttccaattaacacgctcaacgccgggtcgaaaatagcagagccaacgtagccaattttcaactgccctttgcgcccctgccgcaaactgcgcgcattctcgcgaaatttatcgcagtggccgaggatcatccgcgcctcggccagcaaaaaatgcccttcggcggtcagcgcgacgttgcgtcgatcgcgggtaaatagccgcaattccagcgcgttctcaaaacttttaatctgctgcgtcagcgccggttgcgtgatatgcagacgctgcgccgcccgaccaaagtgcaattcttccgccagaaccgtaaatgcctgtagctgtcgataatccatcacgccctcccgaaaacactgataataatatcttattaaaataaggggaaatgtgattggactcttatcggtatctggtgagaatgaatagccattgccagaaacctgaaggaagtacgatgtctgaaccacaaatgaaagtaaccgatctgcgttctgctttggcggtattaagccagtacgatgatgaactgatctacaccgacgaacccgttgaccccatcgccgagctctccggcgtgtaccgctatgtcggcgcccacggcaccgttcagcgcccgacccgcgttggcccggcgatgatctttaataaggtcaaaggctacgatgatgtcagagtgcttattggcctgctgtgttcacgccagcgcgtcgcccgcctgtttggcaccacgccggaaaacctggcgtttatgctcaaagactccgtggcgaatcctatcgcgccaatcaccatcccgcgcgaccaggcggcctgccaggaggtggtacatctggcaagcgatcctgatttcgatattctcaaaattttgcctgcgccgactaacaccccggaagacgcaggtccctactttaccctcggcatgtgctatgccgcggatccggaaaccggcgatcatgatgtcaccatccaccgcctgtgcgtacagagcaaagacgaaatctcgatgtatttcgtaccgggacgtcatctcgatactttccggcaaaaagccgaggcggccgggaaagcgttgcctatctcgattagcatcggcgtggatccagcgattgaaattggcgcctgctttgagccgccgaccacccctctcgggtttgatgaactctccatcgccggcgctctacgtaatcaggccgtcgagctcagcgaatgcgtgagcgtcaacgcccgcgccatcgccaacgccgaaatcgttattgaaggtgaactgctaccgggcgtgcgggtccgcgaagatcagaataccaacagcgggaaagcgatgccggagttccccggctataccggtagcgctcaggcggaagtgccggtgatcaaagtcaaagcaattacccaccgccgtcacccgattctgcaaacctgtatcgggccgagcgatgaacataccaatcttgccgggatcccgaccgaagccagcattctgcaaatggtagagcgcgcgcttccaggctttgtgcaaaacgtccactgtccttcgccaggcaccggtaaatatctcgccgtgctgcaggtgaagaaacgcacccccagcgatgagggccgtcagcgtcaggccgcgctactggcgttttccgccttctcggagctaaagcacgtaatgctggtcgatgaagacgtcgacgttttcgacatcaacgacgtcatgtgggcgatgaccacccgctatcagggcgatgtcagcaccgtgtttattcccggcgtacgttgccatccgctggatccatcatccgacccggccttcagcccatcgattcgcgatagcggtattgcctgcaaaaccattttcgactgcaccgtcccgtggaatatgaaagcccacttccagcgcagccagtttatggaagtggatgttgaccgctttatccctggcttcagtaagaaataaattccacgcaaagaaaaagcctcccatgcgggaggctttgacgcttatggagattgcacaatatatcaggcgttgtaggcgttttcgccgtggctgttgacgtccagcccttcgcgctccagctcttccggcacgcgcaggccgacggtcatcgccgccactttgaagccgatccaggcgacgacggcggaccagaccacggtaatgccgatactttccagctgtaccagcaactgatgccccatcgtgacgccttccgcatagccgacgccgccaagggtagtggaagcgaagatgccagtcaggatacaaccgatgatgccgcacacgccgtgaacgccaaacacatcgcatgggtcatcgacgcgcagccagcgcttcagcaccgtgacgccccacagcccggccaggccggcgatgataccgataatcagcgaaccgccaacgccaacataaccgcacgccggagtaatgccgaccagaccggcaatcgcgccggagcaggcgcccagcagcgacggtttgccgcgggtggcccattcgccgaaggtccaggccagaatcgcgccagcggtcgccacgacggtatttacgaaggccagggcggcaatttcgttggccgcgcttgcggaaccagcattaaagccgaaccagccgacatacagaatcgccgtaccggtgaagaccatcggcaggttatgcggtttaaacgcttctttgccaaagcccacacgtttgcccatcatatacgcgcccaccagccccgctaccgcagcgttgatgtgtacgacggtaccgccggcgaagtccagcgcaccatgggtcgccagcaggccgccgccccacaccatatgcgcaatcggcacgtaggagagcgtgagccaaaccaccacaaaaatcagtaccgcggagaaacgaatacgttccgccagcgcaccgacgatcaggcccacggtgatacaggcgaaagagccctggaaagcgacgtggatatattgatagaacgagcccatcaacgctttcagttcaatattcttcagcatcacccagtcgaagctgccgaagaagctaccgccgctaccgaaggcaagcgtatagccatagataacccacagcacgcaaaccaggccaaaagtcacaatgacctgagtcagcattgagagcacgtttttaccgcgaatcaggccgccgtagaacaacgcaatgccggggattgtcataaacagcaccagcgcggtgcaaatcatcataaaggcgttgtcggctttatccgccaccgccggttcggccgccagcgccagtcccggaagcagcgccagcgctcccagagccgttttcatcgtcgttctcatcatctcttcatccccatcgctgtgtggtcaggcaattacagtgccgcttcgtcggattcgccggtacgaatacgaatcacgcgctgcagttcggcgacaaaaattttgccgtcgccaatttttccggtccaggcggccttgcctatcacctcgacaacctcatccagctgatcgtcggcaatcgcaatatcaatttttacttttggcaggaaattgacgctgtattcggcgccgcgatagagctcggcatggcctttctggcggccgaagcctttcacttccgtgaccgtcaggccctgaatgccgatggaggacaacgcttcgcgaacgtcttccagtttgaatggtttgattaccacggtaaccagcttcataaatcccctccagtcagtatttgatagtggccgcagctaacacaggagataaagcaagggatatgccaaaaatgaaaacgggccgtgaatcggcccgtttatggagaaaaaaacgcgaggatgttactggcgagacggcaaatgaccgctaatgcgcaaaaatgcaccaatacggtgcgcccttagtgagcaagttgcaccacttcacgtcacccctgcaccaatgcctgctgatggtgcatcaggcgctcagcgactcctcctcaacgctggcggctagctcttcgccagccagctgtagctggtacatctgccagtagcggcccttcgccgccagcaattgctgatggttcccacgctcgacggcctggccacgatgcagcaccaggatcgtatccgcttcgacgatggtcgacagacggtgggcgataactaccagcgtggtgtgctcgcgcactttcgccagcgcctgctggatagcctgctcggtaccggagtcgatattcgctgtcgcttcatcgaggatcagcacctgtggcgtttccaccagcacgcgagccagcgccagcagctgtttctggcccaccgacaggttgttgccctgctcacccagttgggtataaatcccgtcgctcatttcacgggcaaggtcagcgagttgcaccgcctccagcgcttcccagacctgctgctcgctgatatcgcggcccagcgtcacgttggcatagaaggtatcggctaataccaccggatcctgttgcaccatcgcgacgccccgacgtaaagcgctgtggcttaacgacgacagcgggcggccatcaagacgaatttcgcctttagtcaacggatagtagcccatcatcaggctggccagcgtgctcttgccgctaccggtatggccaaccagcgccacaaaaccgcgcgaaggaatatccagattgatatcctgcagcaccagccgatcgtcgcgataggcaaaagagacgttatcaatcgccaccgcgccgctgcgtaacggcgcgttatcgttaccccagctctggcgtgggcgatccattagctcaaacacgcgctcgcccgccaccaccgcttgctgcagcatcgactgctgggtggtaagttcgatcagcggttcattaagccgcccgaggtagctaataaaggcatataacacgccgacttcgatacttccggaagcgctaaagccaaacagcatcagcaggccgcaaaggatcagcgatgaaaacaggcttaacagcgggcgcagcaggaaaccatccagacgcagcgtctgcatacgcgccagatagtggccatagctggcttcacgcattcgctcgccgaatcgcacctgctggcggaattgctgaataacacccatgccgttgatgacttcgttgaagccatcattgatatcggcaagccaggcgcgcatgcgacgcacgatcggcgtgctgtaacgctgatagatagccatcacgatcagcaccgccgggaagatagccaccgccaccagcgccattcgccagtcgagactaaacatcgccaccagcatcgcgccaatcagcgccgcgctacgcagcaccgtcgccacgactgtcacgtacaggtcacgaatcacttcggtatcgttggtaacgcgtgatatcaactggccgacaggttgcgtatcaaactcgcttaacggctgacgcagcgcagcgtccatcacatcgctgcgcaactgctgcaccacgccgaccgccgcccggttaaacagcagcgcctggttatagtgcagcgtagcggcaaggatctgcaggaagatataggccgccgccaggccgcagaccagcttcaccggtagcgactgtttcgccaccatgttatcaatgaaatagcttatcagcagcgggccgctgacttccgccgccgctgctatccacatcatgataacggcaatgatgagcggcttacgccacggcgaaccgtaggccagcagacgtttcagggtcggccagagatcggcgaaattacgcatctgtcgcctcctcatcctgcggcgcatcatcgagcgccgcttccagttgctgatagcggtacatgtcgcgataccatcccgactgggcggcaagctgctcatggcgtccgcgctgagcaatatggccgtgttgcagaaccaaaatttcactggcttcggttaatgctgagaggcggtgggcgctgataatcaccgtccgcccttccccccactgccgcaggttatgcaaaatatcatgctccgtccgcccatcaaccgccgacagcgcgtcatcaaggatcaggatttccgcctccagcagcagcgctcgggcaatagaaatacgttgtttctgaccgcctgagagcatgacgccgcgctcgccgacttccgtttcatagccctgcggcaagcgcagaatatcatcatgaacgctggccagccgcgcgacatgttcgatttgttcccgggtcgcgtccggtttacccaacgcaatgttattggccacggtatcggagaacaggaatggggtttgattgaccaccgccagccgcccgcgccagctatcaagctgcaggcgagacagcggaatatcatggaaacggatatccccctcggtaacatcaaaatggcgctgaataagggaaagtatggtgcttttcccggctcccgtcgggccgcagataccgagcatttgccccggctgcagggtgaagttaaccttctccagcgacggtttcgtcgcctgcggatagataaattcgcgcaccgccacgttaagtgccccgcgcccctccggcaccgtttcgctaccatcgttgaccaccggcgcttcttccagcatcgaacgaatacgtccataggcggcgctaccgcgctcaacgatgttaaacatccacgccagcgccagcattggccaaatcatcaggccgagatacatgacaaaactggttaactgaccaagggtcagctcgccctgcaacaccagccagctgccgccgccgattgccagcaggttggccgcgccaatggcaatatagattgtcgggtcgaagcgggcatcgatacgcgcaacccgcatgttcttcgccccggtatccgccgcatcgtcggcaaactgcgccgactggcgatcctcaaggccgaacgctttaatcatccgtatgctggtcaggctttcctgtgtgcgatcgttgaggctggaaaaagccgcctgcgccacgcggaaacgctcatgcagggcatcgccattacgcttgatcgccagcgccataaacggcatcggcaccagcgccagcagcgttaactgccagctgatttgcgtcgacatcacaatcagtaccgcacaacccatcaccaatgaatccaccagcgtcaggacaccctcgccggcggcgaagacgacgcggtcaacatcgttggtcgcgcgggcaataagatcgccggtacggtgacgcagatagaaggccggatgctggcggctgagctgacggtagaagtcttcacgcagttcaacggccagttgataagaggcgccgaagagcagcacgcgccagacatagcgcagcagataaatcatcaccgcgataaccaccagcgcgccgatccacatccacacctgctctacggtgtaatgttctttagtcacgccatcgaccacaatccccactactttcggcgggattagctggagtacggcaataacggcaagcagagcgacggcgccgagatagcggcgccactcccggcgaaagtaccagctaagttgagcaaataatcgcaaacggtaaaatcctgaatgtataattcgtggcggcaaaaagccgttaatcaataggcaaggccgtggtgtattttatctgttccatggcaaaactcgaagtgacatccgacagccccggcacgctgttcaccagacgtttataaaagtcgtcatagcgcttcatatccgcgacctgtacccgtagcaggtagtcgtactcgccggccatacgccagaaacccagcacttccgccatttgcgacacttcgctgacaaagcggcagtaccagtcactgctgtggtgctgggtttttatcaacacaaaggcggttaacccgagccccagcttttccgcatccaggatggccacgcgctcgcgcaggatgccttcgtcctcaagacgcttgagccgtttccagcagggcgtggtggtcagattaacggcatccgccagcgcctgcaaagagagggtgcagtcagtttgcagcaatgagagcagcttacggtcaattttatctagcataaggccaccagagagaataatttactcccgtaattgtaattgaaaggccaaatagcaacaatttttcccgcacaatccgctaagctgggcacaaaatgacaaacaggaatccgagatgaacagcgcctgggtaaaacatgccattagtgaaattaacgccgactatcagcgttccgccgatacgcacctgatccgcctggcgttgcctggttttccgggtatccctatttatctgaaagatgagagtacgcatccaaccggtagccttaagcaccgactggcgcgctcgctgtttctctatggcctgtgcaacggatggatcaaagaaggcaccacgattatcgaatcgtcttcgggttcgacggcggtctcagaagcctattttgctcgcctgctgggcctgccgtttattgccgtgatgccctcctgcacggcgaaacgtaaaatcgaacagattgaattatatggcggacgctgtcatttcgtcgacaacgcctgcgaaatctacgctgcttccgaaatgctggcgcgcgagttgaatggccactatatggatcagttcaccttcgccgagcgcgccaccgactggcgcggcaataacaatatcgccgacagcattttccgccagatgacccatgagccgtatccgcagccgtcgtggatcgtcatgagcgccggaaccggcggtacttctgcaaccattggccgctatattcgctgccagggttacgagacgcaactgatggtcgtcgacccgcagaattcggtgttcctcgattactggcaaagccgcgacgccagcctgcgcagcccggtcggcagcaagatcgaagggattggccgtccgcgcgtcgagccatcgtttattcctgacgtcgtcgatgagatgctgcgcgttccggatgccgccagcgtcgctaccgccctgtggctggaaaagcagcttggaagaaaagtcggcgcctccaccggtaccaatatgtggggcgtgctgcaactggccacgcgcatgcgcgatgaaggacgccagggttccatcgtcaccctgttgtgcgacagtggcgaacgttatctcgaaagctattacaacccgcagtgggtcgcggcaaatatcggcgatattaccccgtggcaggcgcagattatgcaactaagcggcgcacaataaaaaaagccggatagaacgctatccggcttgctggtagggtctctctattcgggggaataaggaagatcaggattatccagccaatgtgttaaaaaatgggaaacagcctgatgacggcagtctccgatgatcggtagatgcggcagttcagctttgagctgcggcatcgcgttgcccataatgaagcctcgacctacgctaccaagcatctcgcgatcgttcattgcatcgccgaaggccatacagtcctgcaaagtgaaacctaagtgctggctcagcaccgccagcgcagcccctttattacagccgaccggcagcacctccaggcaatccatcgccgagaaacaaagaaacgcgcgatcgcctagcacgtcatttagctggatccgcagacggcgcagatcgtcatgatcgccgcagaaacagatcttggtgacgtgatgcgccggcatccgtttcggatcgcgcagttgataatgaaagccgctgaaggcgtgagcccggagcagttccggccttgcctggccggtaaaccagccgccatcattgaaaacgtgcatactcgcctgagtatcccacacgctgtgcagcacctcttccgccacttccggattcagatcctggcgatacaactcttcaccttccagtgaatggatgcgcgtgccgttaccggtaatcagaaaagcatcaagggaaaactcgccgatcacatggtgcatttccagagcatggcgaccagtggcaaaggtcagggcgatatcgcgttcacgcagccgtctcagcgccgtcagagtctgttctccgagacgatggtccggcatcaacagggtgccgtccatatcaaatgccgccagttttgccatggtattttccccgatgtgtgatgggtttcgcttgtgttgcagtatcgcctgagatatacggaagtaatagtgaatagatattttttattgttccgggttttcggcaaatgagattattaaatcgtttaaatcagtaccagcgcctttggcagccgtcgtccggcgctccgcagcaggtgaccgttggcgagctggctgaacgctgcttttgtagcgagcgacatatccgtacgctgttgcgccaggctcaggaggccggctggttaagctggcaggccagctccgggcgcggcaagcgcggaatgctctgtttttacaaaaccccggaaagtttgcgtaacgagatgatggaacaggcgctgaataagggtcagcaacaaaacgcgctggagctggcgcagctggcgccggttgagctgaaagcgttgttgcaccccttcctcggcggccagtggcaaaacaataccccgacgctgcgtataccttactaccgtccactggaaccgctgcgccccggttttctgcccggtcgtgcggaacaacatttggccgggcagatctattccggcctgacgcgtttcgacgatagcgacaatacgccggtgggcgatctggcacaccactggcaggtatcatccgatgggctgcgctggcacttttatatccgctctaccctgtgttggcataacggcgataccgtgaaaacctcacagctgcagcaaagactactgttgctcctggaactcccggcactacgcaccctctttgccagcatcagccgtatcgatgtcacccacgcccaatgtttgacgattacgctgcatcgcccggactactggctaccgttccgtttagccagctattgcagcgtgctggcgcatcctgacgatccggcgctcggtagcggtccgttccgaataaagctttttggcccggatctggtccggctggagaaccatccccgctaccatttacagcatccgctgatccaggcggtagaatattggatcacgccgcagctattcgaaagcgatctcggcaccagctgtcgccatccggtacagatcaccatcggcgatcccgaagagcttaataatttgcgccaggtgagcaacagcatcagcctcggcttctgctatttgaccctgcgtcagagtccacgtctcagtaaagcgcaggcccagcggataatttcgattatccaccgctcgtcgttgctggaaacgctaccgctggatgaagatctgattacgccgagccatgaagtgctaccgggctggtccattccccagggcccggaaaaccatgaggtgccgctgcctcgccagctcaccctgctctatcatttgccggtcgaattacacacaatggctgagcaactgaaactacgcctcgccactctcggctgcgaactgacgctcatttttcacgacgccaaaaattgggacggctgccggtatctggcgcaggccgatatgatgatgggcgaccgcctgattggcgaagcgccggaatatacccttgagcagtggctgcgctgcgatacgctatggccccatttgctgaccggggcgcaatatgcgcacctgcaggcaacgttagatgccgtgcaggcgcagcccgaagcgcgtagccgcaacgatgccctgcgcaacgtcttcaatacgctgatggatgacgccatcatgacgccgttattcaaatataattaccgcatcagcgcgccgcctggggttaacggcctgcgccttaatgccagagggtggttcgactttgccagcgcctggctaccagcatcatcggcgtgagagagctggtcgccgcgagcgtctgacggtaccataacgctctcacttatttagtcaggaattgccatgaaacgcgccgtagttgtcttcagcggaggacaagactcaacaacctgcctggtgcaggcactggaacagtatgatgaagtgcattgcgtcacttttgattatggccaacgccaccgcgccgagattgacgtggctcgcgagctggcgctaaaactgggcgcggtagcgcacaaagtgctggacgttacgctgcttaacgaactggcggtgagcagcctgacccgcgatagcattccggtaccggattacgagccggatgccgatggtattccgaataccttcgttccaggtcgcaatattctgtttttaaccctgacggcgatctacgcctatcaggttaaggccgaagcgattattaccggcgtttgcgagaccgacttctccggttacccggactgccgcgacgaatttgttaaagcgctgcaccacgcggttagccttggtatggcgaaagacattcgctttgaaacgccgctgatgtggctcaacaaagccgagacctgggcgctggccgattattggggccagttggatctggttcgccgcgaaacgctcacctgctataacggcatcaagggcgacggctgcggccagtgtgcggcctgcaacctgcgcgccaacggcctgaatcagtatctgggcgatcaggccggcgtgatggcgcaaatgaagcaaaaaaccggtctgggccaggggcacgaagcttaagttcaacgtccccggtggcgcttcgcttaccggggctacgggttcgcaactctccgcggtccgactgttattagcgcaaattcatctggtcgagcttttcgcgcaactccccttccagcagctgcgccttctgcgttttcaaatcaatgcagacaaaggtaatcagcgcatcggccaccacttcaccgttagggttaagggtcacaacctgactaagggtgccgcttttgccgttcaactgctcaagcttactggtcacggtgagcacgtcgccaagtaccgccgggcgacgataattgatattgatattgaccaccacaaaagcgatgttatggctggtcatccagtgaaacgccggactactctccagcccatcccagcgcgcctcttcgagaaactccagataacgagcattgttaacgtgctggtaaacatccaggtgataaccgcgaactttaatttgagtctgcatagcgcacatgccttactattattgttgttaatcaggtaagaggtcacaccagatgatgtaacctctttagcatggcaaagatttgctactgtgcaaaccaacaggcgaaaattacagcgtcagatgtgacagatttctctctaccagtgaactgcccatcccagggacctgtttaagatcgtcgagagtcttaaacggcccatattcttcgcggtagctgacgattgcctgcgctttcttgagcccaacgccgttcatagcctgtgctaactcctccgcgctggcattattgatgctaacctgcgcgccgtgggtatccgccgttttggcctcctccggcattttcgtctgcggcgcctgaatagtttcttttgccgatgccgccttgccgctcgccgatgccgccagcgccccctgagaacccgccgcacaagccagcaacacggcggcaataaccattttcattcctctgttcatgctgttatctccttgtttgtagacagcaaggtcacgatagcggctacaaaaaaggagtacaaaaggcagattgcggaaatggaaaaggccgcgaaagcggcctttaagtattgcatcgcgttacctcgttttgcgagacggcgcgaaattattgctgctggtcgatgatgtcgccgagcttgattttggcttctttacgcagattgctcatcaacgcttcgaatgcgatttgcgcattattctgagtaataccctgcaccatcgctttcttctgctcttctggcatagcgcccgcttttacttcatccagcgccagcaatactacgttgcctttagcatcgctgcctacgccgtagctggctttatctttctgcggcagcggcaaagagaatgcagcctgactcagtggatcctggccggtacgggacagcgtctgcgcggcgccgaagctcagccctgcggctttcatcgcttcatcacctttgcccgctttcagggcggctaacagtttgtcagcatccagtttcgcctgctgttccgctttattgcgcttcacgatatcagtcacctgcgctttcacatccgccagtggcttaacgctttccgctttgtgctcgctaatacgtagaacaaaggcgcgatcgccgtcaacggtaatgatatcggagttactacccggcgcgccgttttcacccaccagaccgccattaaagatagcatcggcaaccggcttgaagttcagctcctccggcaggttgtcacggccgaaccagccggtctcaaccactttcaggccggcaacctgcgccgcgcccgccagggattcgttatcattgctggctgcatcgctaactttctgctgtagcgcgtagtacgcgtccagcgctttttcctgtttcactttagccgcgatgtcgttacgcacatcggccagcggttttacctgtgccggctgaacatcatcaaggcgcgccaccaggaagcctacggaagatttgatcactccggaaagctgacctttgtctttcaggccggcatctttgagctcaggcacggtagaggcctcttccatccagcccatatcgccgccgttacgcgcagagatgatgtcggtagatttctcttttgccagcgtggcgaaatcggcgcctttttgcagttcggcgagcaccgctttcgcatcagcttcagttttagtctgaatcacgctgtagcgattacgctgcggctgagtgaactgatctttatgctggtcataccatgactggatttcttcgtcagaggcgttttcctgcatgctggcggcatccatcttgatgtagctcacgcggaactgctctggcgccataaaacgggcctggttctgctgccagaaggcgttaatctcttcatcactaacggtctgtttcgccgccagcgcgttaacgtcgatagtcgcttcacgaaccacgcgctgttgggataccagcgccgccagttggtcggactcgcccggcagcatgaaatcggtaccggctaccgcattgatcagctgttgcgtcgtcagttggttacgcagcgcttgcgcgtattgatcggtggtcatgcccatttgattcacgatgccgctgaagcgctcgttatcaaacttgccgttcgactggaaggcctgggtctggaagatggcctgtttcacctggtcgtcgctgatgctcaggcccagttcacgggcatactgatccagcagcgattcatcgatcagacggttcagcacctgctgacgcatggtcttcatgtagttttcgttggccgccagctcggagaactgatcgcctagctgctgctgcatgcggttacgctcgctggcaacggcattttcaaactgcgcgcggccaatctcctgaccattcacttttgcggcatagttgttgccgccgccaatcaggtaaccactcaccccggtcaaaatgaacgagacgataatgataccgaaaataatcttgagcacgacgctgttggcggccgtgcgtaggttgtccatcatggtgtaacaacgctccgctgtagatgactttagctcgcgcagcatagcacgtgatggctgccgcgcgtgaggacgtattttgacaagaaaacggggcaattgtcagcccacaagtgcgcataaacacacataaagtcgcgttctggacaaataaaaaaggcacatctcgcgatgcgcccttgtacttcgtcacattccctgacgggagtgccgattagtttaccgcgtctttcagcgctttacctgcacggaagcccggtactttagcggcagcaatggtaatttctttacctgtttgtgggttgcgaccagtacgggcagcacgctctttaacagcaaaagtaccgaaccctaccagcgcaacatcatccccagcttgcagagattcagtaacagaagcgatcaaagcatctaacgcacgtccagctgcagctttagaaatgtccgcacccgcagcaattttgtcaatcagttgagatttattcactgttctcttcctctctttataatttatatcgcaccagaatccttcatggcgcgaccgcgcagcagttatatcaggactgtcatgcccttacaacagagttgtcgatgacccctgccagcgatctaagttagctacacaaaaaaaggctggcaagtacgaatttacttaccagccccacttttcttaacgctatttgcgcgatatcactattttgcgcttacaacctgcatgccaaacggttcattttgcagggcaagtgtcagaacttcctcgattcgctgtaccggatgaatatccaaatcggcgataacgttttccggaatttcttcaaggtcacgcttgttttcgtaaggaatcagaacagtcttaatccccccacgatgcgccgccagcagtttttccttcagaccgccgattggcagcacctggccgcgcagggtgatttcccctgtcatcgccacatcggcgcgtaccgggttaccggtcaggcaggaaaccaacgcggtgcacatcgccgtaccggcgctcggaccatcttttggcgttgccccttccggtacgtgcacgtgaatatcgcgtttttcgtagaagtccggattgataccaagcttctcagcacgcgcgcgtaccacggtcagcgcagcctgaatcgactcctgcatgacttcgccaagtgaaccggtgtaggttaacttgcctttgcccggaacgcaggcggtttcgatggtcagcagatcgccgcccacttccgtccacgccagaccggtcacctgacctacgcggttttcgctatccgcgcggccgtagtcaaagcgctgcacgccaagataatcgtgcaggttttcaccgttaatctcgatgtgcttcagcgacttatccagaagcagctgtttaacggctttacggcacagcttggagatttcacgctccaggctacgtacgcctgcttcacgggtgtagtaacgaataatgccgataatggcgctatcgtcgaccgtcagctcgccctttttcagcgcgttgcgttcgatctgcttcggcagcaggtggcgcttagcaatgttcagtttttcatcttcggtataaccggagagacgaatcacttccatacggtccagcagcggagccgggatattcatggagttggaggtcgccacgaacatcacgtcgctgagatcgtagtccacttccagatagtggtcgttaaaggccacgttctgttccggatccagtacctccagcaatgctgaagccgggtcgccgcgcatgtcggaggacattttgtcgatctcatccagcaggaacagcgggtttttcacccccactttcgccattttctggatcagtttacccggcatggaaccaatataggtacggcggtgaccacggatttccgcttcatcacgcacgccgcccaacgccatgcgcacgtacttacgcccggtggctttggcaatagattgacccagcgaggttttacccacccccggcggccctaccaggcacaggatcggccctttcagcttgttaacgcgactctgcaccgcaagatactcaaggatgcggtccttgactcgctccagaccataatgatcggtatcgaggatctcttgcgcctgacgcagatcttttttgaccttgctgcgggcattccacggcacctgcaccatccagtcgatgtagccgcgcacgacggtggcttccgccgacatcggggacatcatcttcagcttttgcagttccgcttcggttttttctttcgcctctttcggcatcttcgccgcgtcgatcttacgcttcagcgcttcgttttcgtccggggcgtcatccatctcgccgagctctttctggatggctttcatttgctcattcagatagtactcacgctgagatttttccatctgctttttcacgcggttgcgaatgcgtttctcaacctgcagcagatcgatttcagattccatcatcgccatcagatattccagacgctcgttcacgtcggacatctccagcacggactgtttgtccgccagcttaagcggcatatgcgcagcgatggtatccgccagacgcgcgggatcgtcgatgctattcagcgacgtcagcacttccggtgggatttttttgttcagcttgatgtagccttcaaactggctgatagccgtacgtaccagcacttcctgctcccgctcttcaatgaccggagaagcaaggtactctgctttggcggagaagtgctcgccgttatcagacagcgcagtaatacgcgcacgctgtaagccttccaccagcactttcacagtgccgtccggtagcttcagcatttgcaaaattgacgccacggtcccgacggtgaaaagatcgtttacacccggctcatccgtcgacgcttctttctgcgcgaccagcatgatttttttatcatggtccatggccgcttccagacaacggatagatttttcccgccctacaaacaggggtatgaccatgtgcggataaaccaccacatcgcgcaacggcaatacggggatttcaatgcgttcagaacgctcaggattcatagagctctctcttagtttaaagtccgccaggtagccgacgacaccttcattaacgcgtcgccgttaatatgtaatccagtatatggggatgtattccatacattcaacggcgggaacacaggaaaaataaaaggggggataaaatcccccctttttgcttaactgcttgtgtcgattggcgaattattcgccagatgcctgctgcgcttccggcttgccgtagatcagcagcggcttgctctgaccttcgatcaccgactcgtcaatcaccactttttcgacatcttccatggacggcagatcgtacatggtgtcgagtagcgcggcttcaacgatcgagcgcagaccacgggcgccggttttacgcgccatcgctttcttggcgatcgcatccagcgcttcatcacggaattccagctcagcgccttcgaggccaaacagcgcctgatactgcttagtcagggcgtttttcggctctttcaggatctgaatcagcgcttcttcactcagttcattcagcgtcgcgacaaccggcagacggccgataaattccgggatcagaccaaattgatcagatcttccggctcgacctgcgccagcagttcgccttcgctggctttgtcggatttcgctttaaccgtcgcgccaaaaccaatgccggagccggtttcaacacggtgggaaatcactttgtccaggcctgcgaacgcgccgccgcagataaacagaatcttggaggtatcaacctgcaagaactcctgttgcggatgtttacgcccgccctgtggcggaacagcggctacggtaccttcgataagcttcaacagcgcctgctgaacgccttcgccggacacgtcgcgggtaatcgacgggttatctgatttacgggaaattttgtcgatctcatcgatgtacacgatgccgcgctgcgctttctgcacatcgtaatcgcatttctgcagcagcttctggatgatgttttccacgtcttcgcccacgtaacccgcttcggtcagggtggtggcatcggccatggtaaacggaacatccaacagacgcgccagcgtttcagccaacagcgttttaccggaaccggtcggcccgatcagcagaatgttgcttttacccagttccacgccattgctggtgtcgccgttgcgcagacgtttgtagtgattgtataccgccactgccagcacttttttcgcctgttcctgaccgataacataatcgtccagatggtggcgaatttcgtgcggcgtcggcagcgcgctgcgctcgcggtgcggagcgacttctttaatctcttcgcgaatgatgtcgttacataaatcaacgcattcgtcgcagatatacacggatggcccggcgatcagcttacgcacttcatgctggcttttgccgcaaaaagagcagtacaacagtttgcccgaaccatctttgcgtttatctgtcatgagtccaaacctcttcttaagttctttgtgccgcagatgacgacgcaaatgccattctcaggcgcaagtcgcgatcacgcgttgtgccgcccagttgttaaaacaagtatagcggcacccttacgccacgggcatcaattacgatgggtcaagatggaatcgaccaggccgtattccaccgcttccgacgccgacaggaagcggtcacgctcggtatcgcgctcgatctgctcaagggattgacccgtatgatgcgccatcagttcattcatacgccctttcactttcagaatttcacgggcgtggatttcaatatccgtcgcctgaccctgatagccgcccagcggctggtgaatcatcacgcgggagttcggcagacagaaacgcttgcctttcgccccggcggtcagcaggaaggcgcccattgaagccgcctgccccatacagatagtgctgacatccggcttgatgaactgcatggtgtcgtaaattgacatcccggcggtgatcacgccgcccggagagttaatgtacaggtaaatatctttttctggattttccgcttccagaaacagcatctgcgccacgatcagattagccatgtggtcttccacctggccggtcaggaaaataacgcgttccttgagcagacgggaatagatatcaaaagaacgttcaccgcgtgaggtctgttcaatgaccatcggcaccagggccatatggggtgcaaagttatctcgttcgccactgtatgacatttccgtctcctggattaattttgaaaaaacctgctgcactgattgtaaccttatggacggattatcagccagagtttctatccgcagggcactgatacgttgacctggtcattattcctgacgctgcggatgcagatacgtcacccggttatggggatggcgcagccataattcaagcataacaaccttttggagtaacgctatcactgaaaatgtgttttagcactcatcctaagcctatcattgcaataaaaaaaacccgccgcctttcggcaacgggcttttgcgcgaactttaaacagccgggctaaattacgcctgctggttcatcagttcgttgaaggaagtggctttttcagacactttagctttcgccagcacggcttcaacagcctgctcttccagcgccacgttgcgcatgttgtccatcagttctttgttcttgctgtagaactcaaccacttctgacggatcttcgtacgcggaagccatctcttcgatcaggcctttcacgcgctcttcgtcagctttcagctcgttggtgcgaatcacttcgcccagcagcaggccaacaactacgcgacgtttagcctgctcttcgaacagttcgcgaggcagttccagagcctgcttctcgttaccgccgaaacgctgagcagcctgacgacgcagtacgtcgatttcactgtcgatcagagcagccggaacgtcgatgtcgttcgctttcaccaggccttcgatagcctgagatttaacgcggttacgcacggcgcctttcagctcgcgttccatgtttttacgcacttccgcacgcagaccttcaacggaaccatcttcaacgccgaaacgcttgatgaattcagcagtcagttccggcagctcgcgttcttcaacttttttcaggttgataacgaacttagcggctttacctttcaggttttcagcgtggtactcttccgggaaggtcacgtcgatggtgaactcttcgccagctttgtggcctttgataccgtcttcgaagcccgggatcatacgaccctgacccatcgccagtacgaagtcagacgctttaccgccttcgaactcttcgccgtctacagaaccggtgaagtcgatggtaacgcgatcttcagcgtcaacagcgccttctttttctttccagttcgcctgctgcttacgcagggtgtccagcatgccgtcaacgtcagcgtcggtgacttcaacaaccggtttttcaacttcgattgcgtccagacctttcagctcaacttccggatacacttcgaactctaccgcgtaggtgaagtcttcgcccagcttgtattcgcccggaacgtagttcggcgcgccggccggattaattttctctttgatgatcgcgtcaacgaaatgacggctcatcaggtcgcccagcacgtcctggcgaacggaagcgccataacgctgagcaacaacattcatcggcactttgcctttacggaagccgtcaatgcgaacttttttcgctacgttgaccagctcgcttttgacagcattctcgatgctgtcagcggcgatagtaatcgttacacggcgcccaaggccctgagtggtttcaactgaaacttgcatcttgttacctcaaaaaaatcacagtgctcggtcaactctggaagcgcgagtaggtggcttcgcagaaccgggatgccctcttcaaatcagaaacacattccctgtcgtcagaatcatcccgaagacattcatatataagacgcggcattatagcggcatcacttttgtgagtcgagaacggttgtcacccactgctgcggcgtttttcacatttcccgctcaaatttgtctgcaaaagcgcgaactttgcgcattttccaggcaaaagaaaacggcccgcaggccgtttttgctaaatcttcacgcaacatactggaaaagcgccagcggttgcaaatgtgatttttacgcgatgctacccgctccgcggcatggcggagaggcaaagacggtatcctgtagcccttcccactctttaatcgtgtaagtatgcagcgccagcgcgtgcacggtgcttgacagctcctcggtcaacgtaccgtaaatcatacgatgacgattaaggaaacgttcgccggtgaagcggtcgctcaccaacaccactttaaaatgactttcagagcccgcagggacgttgtgccgatagctttcatccacgacttccagatacatcgggtcgaacgctgctctaagttttgcttcgatctgctcacgtatcatcatgaattttctcctccgacaacgctgagatgccgcctttccctttaaatgttagccgcttttaccgcttccattggcagaaaacaacaaaaaattagcattcctctgatattttcacgcaaaagtatcaggtttactgatgatgaacgctaaatctccctgctaaatcgccaccggaaatgggacgaggtcataaaacgcacaacacgatgattttccactcgtagccacttcccctcaccgttggcgatgttatgatggcgggaattttccttaaacaccctaactacttcgagttgcagaaaaaagcgcccgcgattccccgcggcgtctgaaacctgaattatgacgggtataacaacaccgtgcgttgagaccctgaacatgctgaagaaaattctattcccgttggtcgcgatgtttgtactcgcaggatgcgccaccccgccgacgaccattgaagtatcgccgaaaatcaccctgccgcagcaggatccgagcctgatgggcgttaccgtcagcatcaacggcgcagaccagcgtaccgatcaggcgctggcgaaggtcacccgtaacaaccagctggttacgctgaccgcctctcgcgatctgcgcttcctgttgcaggaagtgcttgagaagcaaatgacgtcgcgcggctacatgattggcccgaacggcgccgtcgacctgcagatcattgttaacaaactgtatgctgacgtctcgcagggcaacgtgcgttacaacatcgccactaaagcggatatcgccatcatcgcgaccgccgctaacggcaccaagatgaccaaaaactatcgcgccagctactccgttgagggcgctttccaggcttccaacgagaacattgcgaacgcggttaatagcgtgctgaccgataccatcgccgacatggcgcaggacaccagcattcacgacttcatcaaacaaaacgctcgttaataaaatagcagacccggtatcataccgggtctgctctatatgccatgtccaatcactacttgcgtatttttcagcagcccaaatcagctattttgctgatccttggctttgcttctggtttacctctcgcgctgacctccggcacgctgcaagcgtggatgaccgttgaaaatatcgatttaaaaactatcggcttcttttctctcgtcggtcaggcctacgtatttaagtttttgtggtcgccattaatggaccgctacacgccgccgtttttaggccgccgccgcggctggctgctgacgactcagcttgcgctgcttatcgccatcgccgcgatgggctttcttgaacccgcaacgcagttgcgctggatggcggcgttggctgtggttattgctttttgctccgcatcgcaggatatcgtctttgacgcctggaaaaccgacgtcctcccggcggaagagcgcggcgccggtgcggcgataagcgtgctcggttatcgtttgggaatgctggtttccggagggttagcgctctggttggccgaccgttggctgggctggcaaggtatgtactggctgatggccgcgctgcttattccttgtattatcgccacgctgctggcgccggagcccagcgacgtcattccggtgcctaaatcgcttgagcaggccgtcgccgcgccgttgcgcgatttcttcggtcgcaacaacgcctggcttattctgctgttaattgtcctttataagctcggcgatgccttcgccatgagcctgaccaccactttccttattcgcggcgtcggttttgatgccggcgaagtcggaatggtgaataaaacgttgggcctgttcgccaccattgtcggcgcactctacggcggcgtgctgatgcagcgcctgacgctgttccgcgccctgctgatctttggcttgctgcagggggcctccaacgccggatactggatcctctcggtcaccgataaacacctttattcgatggcggcggcggtattttttgagaacctgtgcggcgggatgggcaccgcggcgtttgttgcgctgttaatgacgctgtgtaacaagtcgttttccgccactcagtttgcgctactgtcggcgctgtcggcggtgggtcgcgtttacgttgggccgattgccggctggtttgtcgaagcgaacggctggccgacgttttatcttttctccgtcgttgccgccgtgccggggattttgctcctgcttctgtgtcgccgtacgctggaatatacccaacgcacggaaagcttcttgccgcgcacgcaataccctcagacttacgccctggcgctgcttatcctggcggtaggttgcttgatgctggcgatatggctgctgctgttggcgatgaacgcgctggattacacctctttctccttcctgcctggcctgctggaagtcgccgcgctgaccgctatcggtggtattttgctcggcgcgattctggactatatggcgctacgcaaaacgcagctgatttaattttcgccaaaccgttaatagccgttttaattacccgaggtaattataacggcttattagcgattttattttccttgggagctgatttgttgttttgtgcgttttagatttctggaaattattgacaatttttacgcgtttctttaattaatttaaccgattcagcagcgttactttattttaacgttttctttatgtcttttatttgataattaattgttaattatttgtgttattttaaccatgtttatacccgtacacccataagcattccctttcttatccctttcgttatagatccagcgtaaatcaggctttgcaagcaattacgtcacattccgtaacatatgtgacaatccaagcagaacccgctaacacagaactgacacagatccaatcgtgtttacagtaatgcaaccttaccgtaaaatgcccgtacactttaaacgccaccagatcccgtggaattgaggtcgttcaatgagactcaggaaatacaataaaagtttgggatggatgtcattaatcgcaggtactgtattactcagtggttgtgattctgcgctccttgacccaaaaggacagattggactggagcaacgctctttgattctgacggcattcggcctgatgatgattgtcgttattcccgccgtcttaatggcagtaggatttgcctggaagtatcgcgcgagcaataaagatgcgaagtatagcccgaactggtcacactccaacaaagttgaagctgtggtctggacggttcctattctgatcatcttgttcctggccgttctgacctggaaaaccactcacgctctggagccaagcaaaccgcttgtccacgacgagaaagcaatcaccatcgaagttgtatcgatggactggaaatggttctttatttacccggaacagggtatcgctaccgtcaacgaaatcgccttcccggcgaacgtaccggtacactttaaagtcacttccaactccgtgatgaactcgttctttattccgcgcttaggtagccagatttatgcgatggccgggatgcagactcagctgcacctcatcgctgatgaagcaggcacttatgacggtatctccgcaagctatagtggcccgggcttctctggtatgaagttcaaggctatcgccaccccggatcgtgcaaccttcgatcagtgggtagcaaaagcgaaacagtccccgaactccatggactccatggctgcattcgacaaagtggctgtgcctagcgaaaacaacaaagtggaatacttctctaacgtgaaaccggatttgttcaaagatgttgttaacaaattcatgtctcacgagagcatgaacatgtctaaacctgaaggcgagcacgctgcgcacgaagggatggaaggcatggacatgagccacgcggaaaccgctcactaaggggccgaggaagaaaacgatgttcggaaaacttacactggatgcagtgccctaccacgaacctattatcgtggtaacggttgctgcaatcatcgtcgggggactggcgatactggcagcgatcacttacttcggtaagtggtcctacctatggaacgagtggctgacgtccgtcgaccacaaacgtctcggtatcatgtacgttatcgtggcaatcgtcatgctgctgcgtggctttgctgatgccgttatgatgcgtagccagcaggtgctggcctcagccggggaagcaggattcctgccacctcatcactacgatcagatctttaccgcccacggcgttatcatgatcttcttcgtggcaatgccattcgttatcggcctgatgaacctggtggttccgcttcagctcggcgcgcgtgacgttgcgttcccgttcctcaacaacctgagcttctggttcacggttgtgggcgtgattctggttaacctgtctctgggcgtcggtgagttcgcacagaccggttggctggcgtatccgccgctttcgggaattgagtacagtcctggcgtaggggtcgattactggatttgggcgctgcagctctccggtatcggtactaccctgaccggtatcaacttctttgtgaccattatcaagatgcgtgcccctggcatgaccatgttcaagatgccggtattctcatgggcatctttgtgcgccaacatcctgattatcgcctccttcccaattctgaccgtcaccgtcgcgctgctgaccctggaccgctacctgggcacccatttctttaccaacgatatgggtggcaacatgatgatgtacatcaacctgatttgggcctggggtcacccggaagtgtacattctggttctgccggtattcggggtcttctccgaagtcgcagcgaccttctcgcgtaaacgtctgtttggttacacctcgctggtgtgggcaaccgtctgtattaccgttctgtcgttcatcgtttggctgcaccacttcttcaccatgggtgccggcgcgaacgtaaacgccttcttcggtattaccactatgattatcgcaatcccgaccggggttaagatcttcaactggctgttcaccatgtacccagggccgcatcgtcttcaactcggcgatgatgtggactatcggcttcatcgttaccttctccgttggtgggatgaccggtgttctgctggcagtaccgggtgcggacttcgtactgcacaacagtctgttcctgattgcgcacttccataacgtcatcattggcggcgtggtattcggttgcttcgcaggcctgacctactggtggccgaaagcctttggtttcaccctgaacgaaacctggggtaaacgcgcattctggttctggatcatcggcttcttcgtcgcatttatgccgctgtacgtgctgggcttcatgggtatgacccgtcgtctgagccaggacatcgatccgcagttccactccatgctggttgttgcagcatgcggcgcggcgctgattgcttgcggtatcctgtgccagctgatccagttctacgtttctatccgcgatcgcgatcagaaccgtgacctgactggtgacccatggggcggtcgtactctggagtgggcaacctcttctccaccgccgttctataacttcgctgtcgttcctaacgttcacgagcgtgatgcgttctgggaaatgaaagaaaaaggcgaagcgtacaagcaacctgcgcattatgaagaaattcatatgccgaaaaacagcggcgcgggcatcatcattgctgcattcgcaacggtgtttggcttcgcgatgatctggcatatctggtggatggcgattgttggtttcgccggcatcgtagtgacctggattatcaagagctttgacgaggacgtggattactacgtaccggttgcagaagtcgaaaaactggaaaatcagcatttcgatgagattaacaaagcagggctgaaaaatggcaactgatactcttgcgcacaatgcccacgcgcatgaacacgggcaccatgatacaggaccgatgaaagtcttcggtttctggatctacctgatgagcgactgcattatcttcgctacgctgttcgcaacctatgccgttctggtgaacggcacggctggcggcccagcgggtaaagatatctttgaactgccgttcgttctggttgaaaccgcactgctgttattcagctccatcacctatggcatggcggctatcgccatgtacaagaacaacaagagccaggtcgtttcctggctcgccctgaccttcctcttcggtgcagggttcgttgggatggaaatctatgaattccatcacctgattgttgaaggtatgggtccggaccgtagcggcttcctgtcagcgttcttcgcgctggttggtacccacggtctgcacgtcacctctggtctgctgtggatggcggtattgatggttcaggtatcccgtcgcggcctgaccagcactaaccgtacccgtattatgtgcctgagcctgttctggcacttcctggacgtggtgtggatctgcgtgttctctgttgtttatctgatggggggcgatgtaatgagtcattctaccgatcatagcggcgcttctcacggcagcgtgaagagctacatgacagggttcatcctgtcgatcattctgacggcaatcccgtttgcaatggttatgagtggctctgcctcgcatgcagcgattctgggaaccatcctggtcacggctgtagtgcagattctggtgcacctggtgtacttcctgcacatgaacagtaaatctgacgaaggttggaacctgaccgcgtttatcttcaccgtaatcatcattgctatcgttgttgtcggctccatctggattatgtggaacctcaactacaacatgatgatgcactaagagcggcgagtatgtttaagcaatacctgcaagtaacgaaaccaggcatcatttttggcaacctgatctccgtgatcggcggtttcctgctggcctccaaaggccacatcgactatccgctgttcgtctggacgctcctcggagtatccctggtggtcgcctcgggttgtgttttcaacaactacatcgaccgtgatatcgatcgtaagatggaacggacgaaaaaccgggtgctggtcaaagggctgatctcgccagaatcatcgctggtatacgccaccttgctgggtattgctggcttcatgctgctgtggttcggcgctaacccgctggcctgctggcttggcgtgatggggtttgtggtttatgtcggcatctatagcctgtatatgaaacgccactctgtctacggcacgctgattggctcactctccggcgctgcgccgccggtgattggctactgcgcagttaccggtgattttgacagcggcgcggcgattctgctggcgatttttagcctgtggcagatgcctcactcttacgccatcgcgatcttccgtttcaaggattatcaggcggcgaatattccggttctgccggtagtgaaaggcatctcagtcgcgaaaaaccatatcacgctgtacatcgtggcctttgccgtggcaacgctgatgctttctctgggggggtacgccggatataaatatctggtcgtagcggccgcggtaagtgtctggtggcttggtatggcgctgcgcggatacaaagtggcggatgataaagtctgggcacgtaagctgttcgtcttttccatcgttgccattaccgcgctgtcggtgatgatgtcagtcgatttcatggtgccggattcacataatctgctggcttacgtcagataagattacgctaaatctgaatgaaaagagcctccgctagtcgggggcttttttatgccaccaacataaaacaatttcataaatactgccctcccctcaccgttgtacttcattttcttcactcatcactcagttaaaaattgagaaaaaagtgagtattgctaaccgccagccatctcgcgccattagcggaggggtgctagccttgtgcagtaggcaaacgcctacggaaaacatggatttaacagcaaggaataacaatgaaagaactaacattcaacgaaatggaatctgtctcaggtggttttaacctggtgagcgctgcaactggcttcgctagctttgtcgctaattctgcggctgggtttacctcatttgcgctgacttccggtctggctttcgcctctttcgttggcgatagcgcgattgagtttggcaagttcctccttggtcaggcaaactgggaaagcgtcgttagcacaggtcaagagaactgggcaaacttcgtttctaccgctggtaacagctggaacacattcgtgaacaacgccgctaccgactggaatagcttcctggagcaggccgcttcctaatcggagctatattaagggcagatttttcacgctgccctttctgttgttttacattatttattcagatcttcatcattttttcgtctggttctcatcccttcttctattacgcaacacagtcgtaatatctgctaaacaaacatttatttacgcgtccttatcccaccactacactagtcacagtttttatattgaggtggtaatgaacgataacaaaatgacgccaggagaactgcgcgcaacctggggtttagggaccgtgttttcactgcgcatgctcggcatgtttatggtcctgcccgttttgaccacatatggcatggcgctgcagggggctagcgaagcgctgattggtttggctataggcatttacgggctcgcccaggccgtcttccagatcccgtttggcctcctgtctgaccgcatcggccgtaaaccgttaattattggtggtttgctgatatttgttatcggcagcatcatcgccgcgctgaccgattccatctggggcattattcttggccgcgccctacagggttcaggcgctatcgccgccgccgtcatggcactgctttccgatttaacccgcgaacagaaccgtaccaaagcgatggccttcattggcgtcagctttggcgtgacctttgccatcgctatggtgctcggccctattgtcactcaccagttggggctgcacgccctcttctggatgatcgctattctggcaagcctcggtattttgctgactctgtgggtagtaccaaatagccacaatcatgtactgaaccgtgaatctggcatggtaaagggctgtttcagcaaagtgcttgctgagcctaaactcctcaagctgaacttcggcattatgtgtctgcacatcatgctaatgtcgacttttgttgcgctgccaggacaactggaggccgcaggtttcccggcagccgaacactggaaaatttacctggtgaccatggtcatttcctttatcgcagtggtgccgttcatcatctatgcggaagtgaagcgcaagatgaaacgtgtgttcctgttctgcgtcgctctgctactgatagcggaaatcgtactctggggagcaggtggctatttctgggagttggtcgctggtgttcaactattcttcctcgccttcaatctgctggaagcgttattgccttcgttaatcagtaaggagtctccagcaggctacaaaggcacagcaatggggatttattctaccagccagtttatcggtgtggccatcggtggcgccctgggcggctgggtagatggattctttgactcgcagaccgtgtttttactgggtgcgctactggcgatgctgtggctactggtggccagcaccatgagtgaaccgccttatgtcagcagtcttcgtgttgagatcccgggtgatgtcatcattaatgatgaactacagcgccgtctgcagtcgaaaccaggcatcgagcaggttatgattgtcgctgaagaacgttcagcctacataaaaattgacagcaaagtgaccaaccgcttcgaggttgaacaggccatcattgcaacttcataatagacctgaatttctgacctctaaacaataagtcgaacgactgtacacacagaagatactctcgggtatcttctgttatcaaatatgaagttgcgaaacaatacccatcgcttatctaagcgtcgtttgtgaagtttaattcacattaaaattaatagatcatttaaatattcactattatataaaaaaccctctgattagtatattgcccggtgtgcaaaggtacatcattaacaattcattaatctaggatggaatttaaaatgaaagaattaaccgcaaacgaaatggaatatatctctggtgcaggcattatcgacctgccttgtgctttggttgatttcacgattcaatctgcactgggtcttgttgctgcgggtattaatgctggtatgattctggcctcctccgctctggaaaccacgattgacctggtttccaatattcttggtggttcgccatccagcctgggaagcattctaaccgaccatatcaactctctgctgtatgccgaatctggggtttggtctaattttgtttataatgctgccactgactggggtggtgttgttgatgccctgcagagctaaatagtataaggccagtcagttttctgactggccttatttcaattcttaattcttatcttcaccacacctgagatacatatcgcacgctgtcatgtaatcatcatgccaacgccagtaaacatgcaaataaaaatatcccatcgcaggtatcatgcagacaataagatatgcataaaagtatattccccaacctaataatttcaacaacagactcatcgccacaatccagaataactgaagagtgaagaaaataaataatcttaaccacaagggttttctatatatccctggaagaaccatcgtatttacaagatttacatcaaactctttttggaaaagtctgcctaaaaaagtgtaacgccttgaagggtgagcgaaaatcagattaaccatcagtatcgctgaacacagaatcaacatggcaacgatcaactttgccgaaaaaaaaccattagataaagaaaaatcatcatcagcaaccaatggactgacaaccacaaaactggtcaaaaaagtcatagtgacgttcaggcaagtataataatgaagattacggtatttaagcgtaaatgcagtttcctgctgtaactgcttgacgtaacaatttctggcaaaccagcacattagataaacaatgatcggcacaaaaaaggcaatacagaccattgcggtaatagtcggcaaaaaaaacagacacgcctttactgccagatagcacacgatgaaacagcatccagttgcgacaagtggatgccacagcagaacctcaaaacgcgaggcgattttcccctgaaaccaggagaaattgatatttcctatctcgtatttataagcccagtacccctttagctcataaacaaagctgaacattgttaacgaaaaaatggcacttacgggaaatgcatcctcctgggtcaacaaataccctctatttttaacatatagcgcaataagtgatatacaaataaaataaagatacgggagaagcgaccgatcctgacgacgaatgaaagttaaataatccgggatcatattaacctcgtggcgccaccaatagttttctacagtgtctataatactctgcagagaaaccgtcgaaatcatttagcaattgtccgagatacgccttattgctgatttcaacaaacctggcagaggggatatgttgtaaaaaagcgctcatagatgctgtccactgtaccctatgggtcaaatgcaaagataagttctctttaattttctccggattatattcttcacacccggtgacattcatcagtacaggatgatttggccggagaatttccaccgtcttcagcgcatcccgcatgggttgaaccccctcagacataagaggtgtatgccagggtccgctaacgccaagtttgatagcttccaggccagcccccattagtctcccggtgaattcacttaaatctggtagcgtaccgccaactacctgctggtaggggctattatcacaactcacaacaacttgacttccggagtcgttaatcaactggcttaccatttgaaaatcagcgcctcttaccgctagcattgcgcctttatggatattgcttaaatcatccataatggttgagcgcgccaatattagcttgaacacattttccagcgttaaggcgccggccgcgtatagtgcgctatactcaccaacgctatgcccgcacgaaccaataacattcgcatcagagaattgctcggcatacagactatatagtgtgacattgatagccgtcaccgctgcctgctgcgtcgtcgttttcaccagacgattcatcggccctttctgacacaaccggcgcagatctaaccctgtcacatcgctggcacagtcccagatttccctggtagttgtattcagatcccataaatctgctcccattccgacaacagggtttccctgaccggcgaaaataagcaccgtaggttgcactgattgttttgtcataagcgatatatccttataaatagtatttaaatccgacgtaaactccgagggtctcgccaaaaagtgcgaactcagaatcatgactaccgaatgcgctatacaaacccgtataaatctcagcttggtcacttaatccttttaacggattgatataatgagtacctactaaggcactaccatcaactaagttcatcaccagatagggctgaagcgttgaatgatctgcattttgtaaacttagccatgaagtaatataatgccgtccctgcagcattcctttattccctgtattacttatttctgagcccatcagatacttataatcatcaaacactttgtctaagctggcaaaaccggtttttttacttaataacttaataaagtcaacctgttcccgccatgccgattttgaataaccttcactttgatagtagtactcgatgcccaacacactaaaaaggtcggtggtatactgcccaccaatggctacttcatagccacttttgtcattctgcgcatagagcgatgaaggatatagcccagaaagcacctcatcctttttttcatgagaaaaatgccgccattgctgcgttttgtgaagcgcaacttctacattgactacaaactgaggtgttaagttgtagccatctgctagtgccaatgaagtagaatcaccaagcatcacattcgcagccagtcgatgattaacaaggtgataatcggtgtaacttaataaatagtattcattgctgttagccctttgattggccgtccagttgcttgatgactcatagtatttatcaatacttgctaattttggtataactgtgagtgagaatgcataatcacgaaattctttcgctaaccgccctccccaatacgactcgctataggcagactccagcttcgggtcgtatatccgtgtcggtttaaaacctgcataataggtggctaccagtgaagccggggatcttaaatgaaaggctcctggaagtgaatttagttttccaccctcaagactgacattttcagataacgacaagttaagcttaagtctgtctattaacattttggcgcgatgttcatctttttcgaataatcccacgccatgtattggataaaatcctaaattatatagtgaaaaatccaaccccagcacatcatcaactaagtaacaagcacttgagaagttaatggcaatatcattatatacgttgttcgttgtatacggattggttccattgatgcgccagatcgagccgcttttgtgcgcaacagatgtctgaccggtcaaaataaactgactattagaacgtatttcatcacctgacaaacaattagcccttccccataatggagttattaatatagaaagcagcaaagtaaccagatggcctttcacttcatgcctctctgaataaactctttagtgaagtgaaattcaggtaacgactccaggcggacatcactatacttcatgacagaataccccttttcatagcgcgcattctgcacaatgatctctgttggacgatatttccctagtaccatctgatagtttttatataagacacttttgagaagtttattatcaagagtgtaataagatgctttgaatggccggtattctgcatctttctccaccagataaatcactttaggataagtaacggcctcggagttacgagtgagagacagtcgatagcaaattttatcaccgcagggttcctccccttccagagtggaatcataggcatactcgaagttcgtaacgataacatccccattggagatctgaccaattaatcgttgtgagcgcgaaataggaataggcctgcgtagttccggtgtataaaaccataaattataccaatcagataacatgatcttgcctttatctcgcggaggataggtaaaacgtataagtgaacgagcatcagctttcaaaccgtttaccggcttaataaatcgcatcgatatatccagcgattgcttattttcaggctctgttctaccttctttatactcaagtacagtcacgttatagcggaaaggttcatttggtgagcgaacatcatcagctttgcgaataatctccagggcttgctggctatcactcgtcgcctgtccaggggctgaatatgaaaatatagctattatgaataaataccatgcagtgcttttcatactgtcctctatgaaaatttgaatgcatcggtaatgttgaggcgcgatgcacgatatgcgggaataatggaagccacggcagatgttaaaattggtaatatcaaggttatccaaatcaatcccacatcattcgttttaataaatgcggtataacctactgattgtccaggcgaaggcggcatggcaatacctgagatattaattatagcggcaatagtgaatccaaagagaagactccccaatgcgccaaagataccgatatatataccttccagccagaataaacgcgtaacacggtttgattgtaagccaattgcgcgcagcgtagtaatttctcgggttcgctcgacaatactcatcgtcattgaattgccgatcataaatactacgataagtgccacgataagtttgataaaaaaatagataccggacaacataccttccacctgctggtaaaaaatagaattctccctccaatccttaacgatcaaaggtaaatgctggtccgctatatatcttctcattttcttaacaaacgacgttacatcatcgttattcagcaaaatgactatcttactaacaccattagtacccatgatttgctgtgcagtctcaaggggcattttgattacaacatcatcataatcctttatacctgattcaaatattccacgtaattttacagatatagctccctgacctcccgctatattaacagtcatgatatcaagccagtccccgtagtggctatctaaggtttttgccaggccgctgccaatagtaatctcatcatgtttgacacgagataagtcgctaccaaaaattatcttatcaaaagctcccaacttcagcgccggtaatggctcaacgccctgtgctgaaaaataattagatgtttcagtttcgtaatgtgagattattccggtaaactcaagttgtccggagattgttgaaatcacatcagaaaaatcggcgttctgcaaaattttatttttcagtgtaatataatcagatatcagactcttatttttgttagcggtttcaaagtaggtgctgttataaatctgtacatgtccaatatttgtacgtattgtttgctctttgagtatccaaaaagagtagttgataaaaccaccatataaaaatatggcgcaaccacctaatataatggcggaaatggtagaaaacgttcttcgccggtgccgtagtaagttcaaaaatgaaaatttagcatcgccaaaattaaaaacaatgttataaacaacaaatactaatagcaataccacaattgaattaataaatatcacaccctttgacattcattcacctttaataacgggaacaataacctgtaagacttcaaccatttcccaagccggcatttcgttattttcaaaatcaatttcacgctgctgattaactctccgcagatgatcaacgagttgtttttcttgctgtttcatatggcaattatgaagggcccttaaacgcattatcagtatattaccaatgatctcactgctaaatttgtctttattcttcagcagtaggtcagtatcctcgatggtaatcacacagcgccctaaccccactggtagccaggcatcaactctggcacgtaagtatcgaatcagcatgttgtcttcattggtatctaccgcttcatcaagataaaaaaagcccgtctttgcatattcagaagcgttaatgagatcattgatactctgataatagttagcctgtcgcagcattccccacgaataaaagatcagcgcgccaactttgttagtacgttcatactcttgaaataaatcagaagtgatagatgctaaagcctgtggttcaccaggaaatccatcctgtaagactcgggcagtcgcaggggttgaaaccttctcagcaaatactgaaaatgtaaccatgctaagacacaggagtaaaacgctacaaagattacttcgctgaatcataaattattgctccatctttgatatctactctccgtcgagcacgatctttaagctgagtcgaatgtgttgagataataaatgttgttttcgtccgttgattaatctcaagcaggaggtcaagaattgattcaccggtagcaagatccagattacctgtaggttcgtcagcgacaataacttcggggctatgcgctagcgcccttgcaatagcgacccgttgctgttgaccacctgacaattggccaggttttcttgccaataagtgggataaaccaacactctcaaggaaatgtaacgttctctctctggcctctttcgtactaaaatgaccgttgagcgtcaggggataataaacattatcaaaaacactcagcaccggtattaaattgaaaaattgaaatatgaaacctaaatggcgactgcgaaggcgtgcaagatttttgtctgacaacatattgagatttttatgcagaaagaagacattgccagcagtcggtgtatcaataccggaaagtatattaagtaaagtactcttaccactaccagaaggcccgcataacgcaagaaactcgcctttcacaacatccagattaatattgtttagagcataagtcatattgtcctgataaccataagtcttatatataccagataatgaaatatcaggtaattctgttatattgctgcgcatatcccctcctattggtaccaggtatcaaaataggcatagccgctaactactcccggaataacggttctgagacagccattatgcaatgcatactgattaatatattgccaacttagcgccggtgtcatacatccgctacagccgtagcgagcaataagatcgatgccggtatgaggaaatggttttgttttattgattcctccggcatatgcaaggagatctatatcatccgtattttcaacacctggtaaatgtgggttattggttgcagtatgtatatatggaccacaatgtatttttagatcactttcccttttactaaaaataaaacatcccactctttctattgatatatttatcccgggaatgagtcttttcttgttttttacttcactctggatcatactttcagctgtaaatgccaacaatggcacagcacgatatcctccgcagataacgacaaaatcaaatacatcccatgcaagataatcctgcgccattcccatcgcctgataaagggaaaaattttcgccgcgaattttgcaagtaacatcacttattgaaaatttcttaaccaagttctttggtagagtatcaatagtagataaattaaggctactgatattgtactcaaagacgcctgattctccccaggaatcaatataaataaaagcagttctcgatttcagtaacagcatcctttctttcgctgacatgctatgtaatgcggcatctgatactttatcgaaggcgttaatatacggagtatgttcaggacgccgtgtaatctctcgagtataaatttgacttcttgagccaaaacgtttgaatctccagccgttagctcccgtagttttcaaggcagtattgtatgagtgagactcccatacatttagccaactcgggtagtataaataaaatggctcgtctggttccatgaacgaatatgaagacagatacatactattctccatattagtcagtattattatgcaaattagtcatcaaaagtgcaacgacggaaccgtcgacccctaagccagttttcaggaggtgttttttagtatgtttacttacgcccccctctaaggagatatgatgtgcgacatcctctcgaatctgatcgttaacgacagggaaaattaattctctattaagcagtatatgatgcccaataactaaatcgattaatccagaacctgttgcggtatagccaatttgtcccttataggccaatactggaagagcattttcaccggcatacatgctgatggattttgcctcaacattatcacttgatgaagtgccattaccatggggaataaatgcacaaaggtcttctttttttatacccttatcatttaacattgcattaatcaactttagaatactagtactttgccagtaggaatcattactacgcccagcattaatctgcttgtaagccgaagtaatgcttattccatggcttttccctcgccctaatcggtgctgttgactttccagtaacatagcgccatacccctcagcaaaaattacaccattactgtttataccgaagggttggaccatttcactctccaacattccctggctctcaaggaacactagatcttgatatttaatttttgaaatattgatgatcagcgccagatcaataccaccttgctctattgccctgatccccaggtggatagcagtgagtgaagagttactggtgcagttcatatttgggggaagatgttttaattcgtatcgttttgcaaggcgataggaagccgtgtcctgcgacatatttttcactgataaatttttgattgaggatatcaatgaaacatcttccatatcattataattatagaaatttctataatccatgacatcaacgcgcggacctatccctgtaatatatactctgaccctattacctttcaggcagtcttcattgaggccagcctgaattaaggtttcattgataagtttatataccaggtcaaaagcgctatcattatcccgttttagtttcgctatcagtatattgccagaaaatccacagtcgatagcctgtttatctgaagtaaaccatggagataagtgtacacgtttaccttgccgcaaattttcaattaacagcgaactattctctgcatacggtaaacacacactgaaaccagaaataatagccctttcgctcaccttataatccttttatcacaatagcgtaatagtttccgccttcagtcgctccaattaaaagagcgtatctaatagttagattaagtgattggttcacaaagttgactctctcatcagaaaattgtcgagtataaggaatagcaggaaccgattgtctgcgaatacaatcaagaagaaccgccaggtttagcagacctgcagaagaggcgacaaaaccaaagaatgcattgtaattcacaaccggtacatgaggattaaggcaattaaatgacgtatatatcgcattcgtttctatcattgaatttacttcgctaccattactggtcccgcaaactaaatcaatttctttcgaggtaatacccgcatccgcaagcgcgcgagtaattgccatagacattgctgcggacttctcctcaacctgtgtcacgtcaaaataggtattgctacatgccttaccataaccagcgatttcagctaatacctcagcgccgcgggccactgctgactgtggatcttccaggagcatcatgcatgcgccttcacctggtacgtagccctgtgcttctttgccatatatctgataatcagccggatcggacatcatatgaattttatttgtcaccgcatccatataaagcgacatagaaggaaagtattcatcagccccgccaattacaacctgcggttggagttgttggcgaacaatttcatagccataggtcaatgcgccaagcgcagcattttcaccggtagccaacgttgttgtatatcctttgaccccttctgagatcccgcaaaatgttgtaattgagttcattagagagccgggaaattccgaagtccgaactttccgcgggtcaggtttcaaactttgcaaatacttataggttgtttcttgcggccctcgcgccattcccagaaccatacccaaatcatctccatctcgtttgatcttgcgtttagccatatgcaaagtttctgaaagtgcaagtagagcaaacgtaccgccgcgagttgccttacgcgggtcgtatcgacgtagatgtttgcgtggttccaggcctttcacctgataagttttaaaattctcttctgtctccggctgcttgtactcctcttcctgatattcaccaccaaatatatccgcaaactgattggttttggccaatacacccaacagctctttcgcctcgttaagcgtgtcatcaggaaagacaacaccgctgagttctactgagctgtcgccttcatggatatagtgaagaatctcatttagagtgtgacctatagccgatacagcgcctactccagtaatagcaactcgttttgcttcataggaggtgagtggaactgaacaaggtttagtgctgacaatcatgcagcagttattaccgccgaaagcataattgttattcataaagatattgatatcttttttacgaaactcgttcggtacatagtccagatcgcaattgggacgagcctgcgaaaaactgagtgttggcagaacttttttttctggcagagtcaccaggcacgcaataagttcgacaattcctgccgccccaatattgtggccaaaataagattttgtggaacttattaacaaattttctgctccggagaaaaccttcttcattgccagagtttcgatttgatcattagcttccgtacccgtgccatgcgcattgacataatcaatttgttcaggcttgaccccagcattcgccatcgctttttgcataacctgcactgcgccactggcgcgtgggtcgggacctgtttcatgatatgcgtcgcaagatgtcgcgtaagaaagaatttcaccgaagatggtcgcgccacgcgccaccgcatgttcatactcttcgagtacaatggcccccgcgccctcaccaatagacatacctgaatgccctgaaaatggcgagcatgattgcggatgcataacattcaaggcataaaaacccgcgaaagtgggtaaatagatgggttctgtacctaccgccaacatagccttacttttgccattttggatataatcaaaagccataccgacagcattcgggcttgcggtgcaagccgtcgcaacgagttccactccgcccttcaagcccagtagcgttgaagcgctggagcaacatgatgaaaaactgcctgaaaacagagcctttcttaatgaaaagtcctgaatacgctgctcgaagagagggagaaacgcttctgtacccgcagaagaaacgcccacaatcatccccatctcttccagacactcgcgattggcggccagttctgcctgctctagtgcttccttaccaactttgtaagcccaaagcgcggcattatcgagcgatgcaacaatttcttcagataattcgggacaatgaattttatgcagcatttcagccgctcgggcattcgcaaaccatttagaaaagcgagcgctgtcagcaataccattttttttagccaacagcgcttgcctgaagtctgcaatattgtcggcgagggatgacaatattcccatgccggtaataactactctttttctgctcgttttcatatttttctgttctatccagagtggttaacaacgattccgagaatgccgagttaagaataaagtcgctaattgttataccgtttcaagcgcgcttttcgccttcaattcatcaacataactatggattgttgggttaaccaataaactcagattataaataaaagggacattttgggttttggctgtgatttccccatttacagtttgaatagtaaaaccggagatatccgctaatgcatagcattcgtcaataagtgccaacgcgatccaatgctgtttcgcaggagaatatgctgctttaacaataacaccgacttgatgtccattaaccatcacaaggtcatttgagtcgatgtgactacatccaacatcaggagcaatcccaacaagtttgcgctcagcccccttccgcgatagttcttctaccgcactcttaccaataaagtcttccttgtcatactgaatagcccactgcatttgtagttctactggattacgggagtaattattataaaggctttcgtcccatcccgggttttccactctcaccagacgttgataatctaaaccaccggttttgagcaaatacttagcacctatttcttgtaacttcatccacatcgtgactagtgttgcttgtgggccgatcaactgatatgcaaattcgccatgttttccacagcggaaaatcattaactcatcatcggtattcatatattcataatatggtagaccaatgatatcaaagccataaacctccgccattatctcccatgcataggggccttccagcataatagccccccaattattttcctccatggctttaatttcagggatctcctgaatatctaattcctcagctttagtcagtgcttcgttgagtacatctataatttctttagaggtaaggctctcggataaaatataataaccatcagctgagcacaaaacatatgcatcaccacggatatctccatcagcgtttagcagtagggagtaaataccctgctcatcacggatgattgatacatcagccgaaaccatgtagtttaccaatgcccatgcatcatctcccatcacactggtgatagacatatgagaataatccaccaacaaggcattttcacgcacagccttatattcttcaaaaatatcatgatatgaagaaggtacgcgttgatgattatagattcccataagcgcattatttttaaaatgaagatcagaaagtaaattcataaaatagcctttaatataaccttatcaattcaggatgtttttttctttagaatgaaagatgccagattatttatgcttcgcatataggctggatcatcaccttccgagacctgaatgttgaaggttttatcaagcattacgatgatttccgtggcatctacagagtctagtttcagtccattgccaaacagcggcgtgtcatcatcaatttgatgtgcctcacgttgaacatttaggcgttgaataatttcggacttaatcgtaataattattttttttctttcatcgatttcatcattaatgttggtcacacctgttctccttggtaattaaatgacttctctaaaattaataatcacgccctggctaatgatcttcttcccgacattagctgtgactgaataatgtttaaacccactctcatcagaaaatgagagtttacttaccacttcaatcgtatctcccgggtacgctgtccctttaaacttcaagttctgagaagctaacactccacggacctgcgaccgcctcgtacgtattgtatttagcatatccggatgctttatataagcatgaatgtcacgcaatgttctcagttcttcacccgttcgcccctggtaaatatcacagatatcagtgagaaaagagtaatactcgcttgcctgaccaaatatttcagaaataatagctcctggcataatgggatcttctgggaaatgcccaagcagatacggatcattataagtcacatgctttataactttgatgaaaccattctcgccatacttataatcaactatctggtcgaccataagtagaggttgacgccagccccccatagcaagaaatattttcggcggtatcggatacttagacataaatcaccgcattaccataccaccatcgaccacgatggtttgccctataatatagctggatgctgaagagcttaaataaacaatgacgtttgctacctcatcgcattttccgagtcgttttaatggaattgagttagtcacctcacgaaccacggtacggggaaccttcttcgccattttagattcaatcattcctggcgctaccgcattaacacgcactccccgcggggccagctcagccgcaagagtgcgggtgaaacttaaaattgcacctttggatgcacaatagtttgcctggccaatgcttggtaccagagctgcaacagatgcaacgttgataacaactggactttccgctgaacgtaataacattaatgcttctttcgttaaccgaaacagactaagtaaattgatgttgataaccgaataaaaatcatcaaaactcattgatgcaaagaggctatctttaacaattcccgtattattcaccagcacgtccagtcttccggcatctatggtcaggcgctcgcacaacgcaacgacttcttcccggttcgtgagatcgcaaggcaaaatatgtagcaagtcaccattggcatgattttctttcagtgcaagcagcggttcgtcattcgatttatataatgcataaacaatacatttttgctcaagaaatttcccacaaattgcaagacctatgtcgccgctagcaccagtaatcagcacctttttacttgcaagatcgttatatttatacattttatatgaatgccttaaattaatatatgatggttacggctatcgcatatgtccggcaatgtgaaatacttaatgacatattcatcactcgctgctcattaagaatatccctaactctaccggataatataaactcaggttttccatattcgtcatgaacaacttcaatatcatggaatcgaattccatggccaaatccgtagccaatggcttttaccagagactcctttgcagcccaaaatcctgaggctcgttcataatttagatcaataacatcgatttcttttatttcattattcgtaaatactctctgaagaaaccccgacttatgattagcaatagccttttttattcttgctacttcgacaatatctgtaccaatacgcattacatatttccaaaagaattaaatctggtacgaaaaattgaaattaagcttatacttatccacatcgaaatcatccggatagagaaaaggtgttgataacgaagcatcatactcgaccgctttcaccgcgcctttaactcctaagactccacccattatctttttcccactcaggtcttgtgaaggtaacttaccaattatttgtccataatctgtgccaacataaggggtgataccgtcaaatccagtcaccacattcagagtattttgtataaaaaaacctttattcccatagataccatcgctgttttgaaaaccacgtacactccaacgatcgcctattgtaaattgatcctgtaacgtcaaattatctggtgaatactgggcaccaaaattaagttcgtaataggcgttggctggcaacatcgttaaccatttcacatagttcacattaaggtttacaatttgacttttcttactcacagtgccagtacgcatgtctggtgtgtcagtgccaccaaaagccctggtaaaccgttgccaggttaaagtagaatccaatgcagccccagtaaagtttcttttataatttaatcctaaccgtatgttacccatatctcgtttttgcaaaaccagttctgtcccacccaatgtgtagtcatatttccgtctgatcaattcagcactcgcagacaatttagagttcacattgcggtatagcatacgattacctttgaggctgaaatattccgtctcacctacataatcaaaagtatatataccaacatcaataccctgagtagatttacttttactataaaaaagacttagatcggtatatccaaaaggcacactataataggcactagcatttttataccccccggtctggctacccgtccccgccaggtaaaaaacatcgctcaaactagtgacattatataaataccccactccaccaataagttggtttccagtgctatcatcaccatagttattgtacgaagctctggcactccatattttttttcgttgcgtattaattaccagcttgctcgtgccatttttagtacctggcactatgttaattttaacatcaacctcaggtgttctctgtatattttccaggccctgctcaacatccctgatattgagaatatcaccttctgaaaatggcaaaacccatttacttatatcgttatcaacaatgacaatctcagaaatccttcctggtatcactgccaaacttaattttttagtcaagagatcttgagatggaatttccaccctcgttgttatataccccacatttatatagtaatcttgaaaaagcacagccgcttttttcaacccattcatccctaagcattttccagcaacctgttttttaattttatttaatccgcggtcgtctaaaaaatcattgctaagcactaattcatcaatttgaaaacacggagtttccagcgggaatgtgctatcggtttctttttttgcgacggcatcggagaacacatccttttgttctatttttcggtctttgaacgcagcgttatcattgctttgctggtcttttacaagccgccctaactgagcatcagccgctactgcagggccggtaatcaacaataccaggctaataattactatattgcgaatatccatttcataccctaatcaggtaaaagcagtaatcccttaccgcttttaccttcaacctaagttatttatttacctacaacggtaccaaatacgtttacaacattagctgtagtctcaaatccttgagctccacctaatacagcccagaaaccagtgttgacgattttcttagcatcgattaccgccttacccgctgtataaaggttgccatagttgtagatgttattacttgcagtgacattcaactggctatcagcaactaaattagcccagtttgagatatttttagctgtgacgttagttgttttggcagaaatgtttgcgccaagattattggtcaaatcattcgccgtcgaaatgttcaaagtattaccagcagcaatatcgctgttgttagtgatggttttcccggtcaggttcaagtcaccatcagcattaaaggcgtgattatttgtcaagtaaccggaggcattaaccgtcagattacctttagcattcacccatccggtgttattataatcaccattaatattaatcaagacgtcgctatctgaagagatgactccgttagccgtattctttgcaatggaaccgcttgcttttgatgacaatgaagatgcatcaatttgcatgttaccagagctataaatagttgcgtaatcagcagcgattttcttcgcagcaatcgtcataccccctgaattagcaacaatctgccctttgttacttgcgagatcgccagtcagattaatatttacatcaccggtttgcgcaataatacggccagattcgttattcaggctcttagccgtaatatcaaccccttcaccgccaattagaccgccttgctgattcccatagccgaagtattgccccacatagaaaccaaatttgtcactgtcagtactggtgattttaccaaccgcattaagcgctagtttttcatccgcaaccatcattgtatatttcgcatcaatatcagcgcctgaatcaatactgatatttttagctttgatcaccgaactgtctgtactgactgtatcggctttgatggttacgtcaccgttcacggaagttattacgcccagacggctataatagttgttaagatcgatattaacacccgccccgccattgataccggattggctggtattcatgttgcgaccagtaattgacacagtcttactgctttcaattttacccatatagttatcaatatcactggtggtttggatgctcacatcaccatctgaggcaatttcgccagcccagttaaataagtagtcagcagcaatctcgatgccattacctgagacgatacccaaggattcaccgcccgtggtatcggccgatttgttgtcgttgtttttaactgctttggttgtcgttaattttacagcaccagcactggagcgaatcaaaccagttacgttttcaatattccccgtactttcaacttcaacatttccagttgaatcaatagtgccgccattattagttaacgatgtatttttcaggccaacatagccagcatgaatctgaccgttgttattattaaaatcacctgattcgattgcaacgacacccgcctcaatacccgccgttttagcttttccggtattggtaaaagtattaccgctagtattgacagccagcgtttgtccggcagccagtttaccattgctattatcgaatttaccgctggtaatatagttattagtggttgctaaaatattgccaccgttgatattactaactttattacccgcggtatcaatggcgatcattttgtcgctgttgattttccctgcgctattttctaaaacaccgttggtgttcagggtgatatcaccactggattgaataaccgcattgttgttaagcagtttaccgttactggtaatcttaataccgctatccccggcagaaatcgtccccagattacgcacgcctacgccattttctgtgctgacaaggctaattttattcgcatacataccaccaagcttagaaacatccacgccgtaggtacttgcgttaccggtaggcgttacggagtcggtgaccacaccgtcggcgttgaccgcattactccctgcgacaatcttaagctcactggctgaaagcgcaccattcacaacgacactacgcgccagaatttcggtcggtgattcgctctgaaagccacttacagtaatcgttccgccattaacggaatagccatttaacagcccatcctcacctaactttggcgtacctgtcgtcaacgtccctttttcagcgttgatgaacccgcctccctgagtcgtgatgccattagggttggcaatgattaagtgagcggaatccccggcaacttccatcatgccattaatggtactcgcattcgttgaagtcacttcgttaagaataaccatcgcgctgcggtccgtaaggttcgggttggccgcaatctgcccagccagcacggactgcgccgcgcttgtcgcgttgttaaagatcaccccttctgcgccaacgttcagggtgtcatatacgttatgcgaaagaccattgctattcggtttcgcgatattgacaatcggcacaccatttgaggcttcagtaacgctgccatttttaatagaaatttccgcttgcgccactacaggcatcagcagtaataatgatgccgcaattgggtttaatttcacggacctttttttattttcgtgatatttcatatgaacctttctaagatagtattgattgagtgcagccagaaagaataacctgcgcttatgcagcgatattcaccctgactattttaagtacgcatcatgcgtacaaaatccctgtgaaaagcacgtaaactcatcaaacgttatatgcagttctattcaacaaattaatattaaataagttaaaaattatatatttcagatcgtctacgccgaatgcatatacctacatggcacaaagaaagttgatttaattcatacgaaatatgagacatcccctgtccgtgcatcgagcgtaattcctcgtttaagcgttgttgactcatcatttttcaagcgctaaatcacctgttcttgtgatgcgtaataaataatgccacgtacaacaccatatccttactccgttacagtttccccgatcaatataatgaacaaaaagtgaattctttctatacatattcaattttcttcacttcatgattgagatcacgaccctcgcctcttctctcccagggattattcatccttcaacttcatcattcatgcgtgaattcatctttatgaatttgtatttgaaagcagatgggcacaataagcctgcggcgggtaatgaagccggcatgatgaaatgtcttgtgaaggattaaaaagaagttcagaagagataggttatgaggacttaatttgccggagagaggcttaatgccttctccggcctggatatcaacacaatgcctgaatcgctttgcgttttaatcgcggaagtttttgaactggaatggctggccaagatcgccgccgcgaaccaacgccataaccgactgcagatcgtcacgggatttgccagtgacgcgaatttcttcgccctgaatctgcgtctgtactttgagtttgctgtctttaatcagtttaacgattttcttctgtatcgcgctctcaataccctgcttcagcttagcttcaacaaaccaggtttttccgctgtgtacgaagttttccggcacgtcaagcgagcttccctcaataccgcgcttgagtagctttgcacgcaggatgtccaacagctgattgacctggaaatcagactcgctcagcaccttgatggttttactggtttcgttcagctcaaaggtggcttcaacattacgaaaatcaaatcgtgactcgacttcgcggcttgcgttttcgaccgcattacgcgcttcctgaagatcgacttcagagacaatatcgaaagatggcatcttttcctctccttccgtttcttttgcgttgcataatacccacaacgcggcataactcaacttgttatcccggaagcttagctgataacgctatactttagctacaagcgcctgggaagtcgcaggtgaggaggaataatgaaagtaaccgtactgggatgcggtgcattggggcaactatggttaaccgcgctgtataaaaacggacatgaggttcagggctggttacgcgtcccgcaaccattttgtaacgttaatctcattgagactgacggtagtaatttcaacgaatcaatgaccgctaacgatcctgattttctcgccaccagcgatttactactggtgacgctaaaggcatggcaggtttcccaggcagtgagaaatctggctgctatcttaccggcttctgcgcctatcttgctcattcataacggcatgggcactcttgatgaattaaaaagcgttaaacacccactgctgctggcgtccaccactcatgccgcccgccgcgatggcaacgtcatcattcacgtcgcgcagggaacaactcatattggaccagccaaaagctatagcgaagattacagcggtctcgccgacattctgcaaaacgtcctgccggatgtcgcctggcacgacaatattcaccctgctctttggagtaagctggccgtcaactgtgtgattaatcccctgactgcgctgaaagattgtagaaacggcgatctgcgagattttccgcaagagatcggcgcaatctgtcatgaagtcgcagcggtaatgcaacgtgaaggcattcatacatctgcggaaaacctgttattgtatgtaaatcaggtaattgaaagtacagcagacaatatctcatctatgttgcaggatattcgcgcgcagcggcatacggaaatcgactacatcaccggttttctgcttaatcgcgcccgggcccatggtctgtcagtgccagaaaatgcccgtttatttgaacaggtaaagcggaaggagaatacttatgagcgcgtcggcactgatttgcctcgcccctggtagtgaagagaccgaagcggtcaccactatcgatttattagcgcgcggcggcgtgaaagtgactaccgccagcgtcgccagtgatggcaatctgaccatcgtttgctcgcgcggcgtgaagctacttgcggatgcgccgctggtcgaagtcgctgatggcgattttgatatcattgttttacctggcggtattaaaggcgccgagtgctttcgcgacagccctttgctggtagaaaccgtgagacaatttcatttatccgggcgcatcgtggcggctatctgcgccgcgccagcgaccgttctggtgccgcataatctgtttcctatcggcaacattaccggtttcccggcgctaaaagagcaaatccccgccgaacagtggcaggataagcgcgtcgtctgggacccaagggttaatctgttaaccagtcagggtccgggaacctctattgatttcgcgctaaaaatgattgacctgctggtcggtcgcgaaaaagcatacgaagtggcttcgcagttggtcatggctgctggcatctataattactacgaatcctgatagccggtccgcgcagcgggctggtttcccccttattgaggagccgtagcatgtcccgtagcgcaaccgattctcgtgacctcgtcatcagccgcctactcagcgcccccacgacagccctctggcgcgcgtgggccgacccggctttactcaaaacctggtggtgtcctaagccatggtataccgacgttctggcctttgatttgcgtcccggaggggcttttcacaccgtgatgcacggccctgacggtgaacgtagcgataatcccggctgctttcttgaagtcattccacagcaaaaattagtcatgacctcaatgctgaccgccgactttcgccctgccgtttccccgtttgccatgacggctattatcacctttgcggatgaaaacgacggctgtcgctatacggcaacggtactgcatgcagatgatgaaacccgtgagcaacacgaaaagatgggattttttgaaggctggaatatcgttatcgatcagttgaatgccctggcaatgacgctacgctaacccccagatgtaaaaaagccttcccttagggaaggcttttttataagtacaggcgaattacggacgatacactttcacgttagtaaagccctgctcacgcaggtatagcgcctgcagacggctcattacgccgcgctcacaccacaacagccaggttttactctgatcgaggttgccaaattgggtgctcagtttatagaacggcagcgaaacaacatcgacgccttccactttcaatggcttatcatcctgctcatcgacagaacgaatatcgagaatcacgtcgttcgcgctgaagccgctgacggtttcgacttccaccacgtcctgctgtgtttgctgggcgatatcgcgaatgtcgatgttattcgcttcctcaaccactttatccagaatgctaaaatcgaagttttcttcttccgcttcgatcttcgcttttaccgcttttatggttgggctcttcgagataacgccgcagtattccggcatggtgcgggcaaaatcttcagtgccgatttcgcgcgcaagattgataatgtgttctttatcgtgagaaatcagcgggcgcaggatcagcgtgtctgagacattatcgataagacgcaggttagtcagcgtctggctggatacctggcccaaggcttcgccggtcaccagtgcctgcacgccataacgctcagcgactttcgatgccgcacgcaccatcatacgtttgagcaccacgcccatctggccatcctcgactttctcaaggatttcgccaaccacaggctcgaaattgattgccacgaagcgaacgcgatgggagctgccgaagcggttccacaaatagtgcgccacctgacgaacgccgatttcatgcgcggcgccgccgaggttgaagaagcagtagtgtacgcggcagccgcgacgcatcagcatatagctggagacgccggagtcgaagccgccggaaataagcgacagcacatcttcctgagtaccaatggggaagccgccaataccttcatagcgccctttcaccagcaacagacgatcgttttcgatttccaggttaaccgtcacgtccggatcggtgagcttcacgcgcgccgattcgatatgctggttcaggccgccgccaacgtagcgctcaacctcaattgaggtgaattcatgtttaccacggcgcttcacacgcacgcagaagcttttgccttcgagctgttcgcgccacagcggtagcgtctgttcaaaaatgttatgcagagaagtgaaaggtacgtcctccacttccagaatatgatgaatgccagggatacgggtcagcgcatcgcgaataaccggccgctggttttcgtctttcgcgcgaacttcgatatgatcccaatgacgaacgacggcgagcgtctcatcatagtttttgagaacgttacgaatgttcccggttaagattttaataaagcgcaaccgcacagattggcttttgatggtgatttccgggaacaatttaatgataaacttcatggcgacaatagttcgttggcaagcccgacggggctttaagcaaaaaagttgtacaggcgcgatacagcgtctgcatccagggcgcggagtataccatcattgttcgcttttcgcctggcattgcgcattttcgcaaaaatgtatccgtagggtgaatgccgcgagtttgcttaaccgcccgactccgttaccatactgatagccatcgagacataacaagagtctatattcactatgccaaagaaaaatgaggccccggccagctttgagagcgctttaggcgaactcgagcagatcgttaatcgtctggaaagcggctcactaccgctggaagaagcgctcagcgaatttgaacgcggcgtgcagctcgcgcgccagggccagacgaaactgcaacaggccgagcagcgtgtccaaatcctgctggccgatagcgaagatgcgccgttgactccctttacgccggacgctgaataaatggacttcccgcaacaattacagacctgtgtcacccaggccaatgacgcgctgcgccgttttatctctccgctgccatttcagaacactccgctggttgaagccatgcactatggcgcattattaggcggcaaacgcctgcgtcctttcctggtttacgccaccggcgagatgttcggcgttagccgttccacactggatgccccagccgctgccgtcgaatgcattcatgcctactcgctgatgcatgacgatctgccggcgatggacgacgacgatctgcgccgcggtcaacccacgtgccacatcaagtttggcgaagcgaacgctattcttgccggtgacgccctgcaaacgctggcattttctatactgagtgatacgccgatgccggaagtaccggatcgcgaccgtctggcgatggtttccgaactggcccaggccagcggcgtcgccggaatgtgcggcggtcaggcgttggatctcgaggcggaaggcaaacaggtcgatctacaggcgctggagcgaattcaccgccataagaccggagcgcttattcgcgcggcggttcgccttggcgcgctgagcgccggcgagcgtggccgtcaggcgctgccagcactcgatcgctttgcggagaatatcggtctcgccttccaggtgcaggatgacattctggatgtggtaggtgatactgcgactcttggcaaacgtcagggtgccgaccaacagttaggcaaaagtacctatccggcgcttttgggtcttgagcaagcccagcagaaagcgcgcgatctgattgccgatgcccgccaggctttagatgaactggctgcgcaatcgctggataccacggcactggaagcgctcgcgaattacattattcagcgcgataaataaacaataaatgagtctctgatgagttttgatattgccaaatacccaaccctggcgctggtagattccacccaggagttgcgcctgctgccaaaagatagcctgcccaagctttgcgatgagctgcgccgctatcttctggacagcgtgagccgctcaagcggccattttgcctctggccttggcacggttgaactgaccgtggcgctgcactatgtctacaatacgccgttcgaccgcttaatttgggatgtcggccaccaggcttacccgcacaaaattctcactggccgccgcgacaaaatcggcactatccgccagaaaggcggcctgcatccgttcccgtggcgcggcgaaagcgaatatgacgtactgagcgttggccactcttctacctctatctccgcgggtattggggtcgctattgccgccgaaaaagaaggcaaacagcggcgcaccgtttgcgtcatcggcgatggggctatcaccgccgggatggcttttgaggcgatgaaccacgcgggcgatatcaaaccagacatgctggtggtgctgaacgacaatgaaatgtcgatttcagaaaacgtcggggcgctgaataatcacctggcgcagctgctgtccggcaagctgtattcctcgctgcgtgaaggcggcaaaaaagtcttctccggcgtaccgccgattaaagaactgcttaagcgtaccgaagagcatattaaaggtatggtagtgcccggcacgctgtttgaagagatgggctttaactacatcggcccggtagatggccacgatgtgctgggtctggttaatacgctgaagaatatgcgcgacctgaaagggccacagttcctgcatatcatgaccaaaaaaggccgtggatatgaaccggcggaaaaagatcccatcaccttccacgcggtaccgaaattcgatcacaccagcggcgtgctgccgaaaagcagcggcggcctgccttcctattcgaaaatctttggcgactggctgtgcgaaaccgcggccaaagacgacaaactgatggccgtcaccccggcgatgcgtgaagggtccgggatggtcgagttctcgaaaaaattccccgatcgctatttcgatgttgcgattgccgaacagcacgcggtgacctttgccgccgggatggcgattggcggctataagccgatcgtggcgatctattccaccttcctgcagcgcgcttacgatcaggtgatccatgacgtcgccattcaaaagctgccggtgctgtttgcaatcgatcgtgcgggcatcgtcggcgccgacggtcagacccaccagggagcgttcgatctctccttcctgcgctgcattccggaaatggtgatcatgaccccgagcgacgaaaatgaatgtcgccagatgctctacaccggataccactataacgatggccctagtgcggtacgctatccgcgcggcacaggtaccggcgcggaactggaaccactggcgccgctgccgctcgggaaaggcgtggtgaaaagaaacggcgagaagctggcgatccttaacttcgggactttactgccggaagccgctcaggttgcggaaaaactcaatgcgacgctggtcgatatgcgttttgtgaaaccgcttgatgaggcgctgatcctgcagcttgccgccgatcacgaagtgctggtcacccttgaagagaacgctatcatgggcggcgctggcagcggcgtaaacgagctgttgatggcccaccgtcgcgcggtgccggtgctgaatatcggtctgccggacttctttatcccgcaggggactcaggaagaagttcgcgccgacctcggcctggatgccgccggtatcgaagccaaaatccgcgactggttggcataattacccataccgctcctgctatgcttaaaggataccttttaaagtagcaggagcgtcttatgcactacattcctcttggcgatacccatcttcgcgtttcccgactctgtctcggctgcatgaccttcggcgaacctgaccgcggcaatcatgcctggacgctgccagaagagagtagccgtccgctgattaaacgtgcgctggaaggcggaattaatttcttcgatacctcgaacaactactccgacggcagcagcgaagagatcctcggccgcgcgctgcgggagtatgctcgccgcgattcggtgatcgtcgccaccaaagtttatcatcaggtcggcgatctgccgcaggggctgtctcgcgcgcaaatcatgcgatccattgacgatagcctgcgtcgcctgggaatggagtacgtcgacctgttgcagatccaccgctgggattactccacgcccatcgaagagacgctggaggcgctcagcgacgtcgtacgcgccgggaaagcgcgctatatcggcgcatcatcaatgcatgcccgccagttcgcccaggcgctcgccctgcaggaacagaacaattgggcacgcttcgtcaccatgcaggatcactacaacctgatttatcgcgaagaagaaaacgagatgctgccgctctgccagcgcaaagggattgcggtcatgccgtggagcccgctggcacgcggccgactaacacgaccatggggagaaacgaccgcgcgtctcgtctccgatgaattcggcaaatcgctgtatagcgccaccgacgccaatgatgagcagatagcacagaagctggaggaggtggctgaagaattagatgccaaccgcgcgcaggtggcgctggcctggctattaagcaagcccggcgtggctgcgccgattattggcgcctcgcggcaggaacagctggatgagctcctgcatgccgtcgatttaaccctgacgccagaacaaatcgacaagctggaggcgccctatcggccccacccaatcgtcggcttcaagtaacgccgcaatttataccccggccgcgccggggtgcagacttagagcagacctatcggccagtggtggccaatcagatacagtacgccggcggagatcaccccggcgacgatatcgtcgaccatgatccccattccaccatggatgttgcggtcgaaccaacgaattggccacggcttccacatatcaaagatgcggaaaataacgaaaccggcggccacccactgccagtccatcgtcggtaacgccatcaaagtgatccacatcccgacaaactcatcccaaacgatgctgccgtggtcatgagtgcccatatctttagccgtacggtgacaaagatagacgccgatacagatgctcatcatcaccaccagcgaatagagctgccaggggagaaaggtcatcagataccagaacggaatcgccgccagagaccccatcgttcccggcaccaccgggctcagcccactgccgaacccggtcgccagcagatgccagggattgcgcatattgaggcggcttttcgcctcgtctctactgcgtgccaaaatgatcgtacccctttaaatccaatttaatcggcttaccctcacgggtaaactgcagtccatccgcttccgccacgatctggccgatacaggtaaagcgtgcgccaagctgaccaatcgcgacatccaacgctccgcggttcagctcgggaacggtaaagcacagttcataatcttcgccgccggcgagcgcccagcgtagcgcctgtccaggatcaacctggcgcagcatggcatcggaatacggcatcgcatcgagatcgatacgcgcgccgcaggcgctggccttgagaatatgaccaaggtcagagataaggccgtcagagagatcgatcgctgaattagccagatcgcgcagcgcctgcccctgcagcacgcggggcattggacgcaaatggcgcgccagcagataatcggcatccgctggcgaatcaaccgttagccggtcctgtaaaagcgccagcccggcggcgctatcaccgggcgtgccggtgacataaatccagtcgccaggcctggccccggaacgcttcatcgcgcgacccggcggcacaaagccgtggatacccagcgtcatcgacagcggcccacgggtggtgtcgccgccgatcagctgcatatcgtaatagttaagctggacaaacagactgtcgctaaaggcttcaagccacgcttcgtctgcttccggcaaagtgagggccagcgtcaaccatgccggttccgcccccatcgccgccaaatcgctcaggttcaccgccagcgctttatacgccaggtcggcagggtcgatgtcggctaaaaagtggttgcccgccaccagggtgtcggtgctgattgccagcgtttttttctcggggatattcaggagcgcgcagtcatcgccgatgccggtttcaacatcaaggcgggcgcttttaacgcgatcaaaataacgggcaatcagggaaaattcgccgcatgccatacgttatgcctcagcaaagaaaagaataaggccgggttcgcaggatcagatcctgcaaagcccggcctgcagtttactttttgcggggacggattaccggggccgctttatccagcacgccgttgacgaacttgtggctatcttcagcgccgaaggttttcgccagctcgatagcttcgttgatagccactttgtacggcacgtcgtcacgcttcgacagctcaaacagcgcaatacgcagtaccgctttttctacctgacccagctcttccaactgacgtgacaggtatggcttcatcagaccgtcgagatacgcgctgttagtcgccactccggacagcagttcacggaaatacagaacgtctacatcttttacatcctgttccgccaggaactggtattcaacatcagcgatgtcgttctgggacaactgccaggagtagagcgcctggacggcacactcacgggcgcggcgacgagcagcaggtttcacggaattccccttacaaaaaatcaggccttgatggctttcaatacgttaatcatttccagcgcggtcagcgcggcttctgcgcctttgttaccggctttggtgccagcgcgttcgatggcttgttcaatactttcagtcgtcagaacaccgaaggctaccgggatttcactgtcctgagcgacatgcgccaggccattgcttgcaccgccagccacatattcaaagtgggcggtaccgccgcgaatcaccgtacccagcgcgattaccgcgtcatatttaccggtttttgccagtgcgccagccgccagcggcagctcatacgcgcctggaacccaaacaacggtgatgttttcatcttttacctgaccaatgcgcttgagggcgtcaatcgcgccttccagcaggctgtcattgataaagttgttgaaacgcgcaatggtgatggcgacgcgagcgtccggggtagcaacgttagcttcaataatgttcatactcttccttcgggttcatgtgccccgcaaggggggcggattttatcataatattctgggcgctgcttcctaatattaggaatacatcacgcagtcgttaaatgcaggcagacatcgggcccgacctgacgtatgtcgttgaatttgaaatggggggcctggctcagtttctcaagccccggcagcgcgcataaaccgcgcgcgtcactgcctaacagtttaggcgcaatatagacgataagctcatccaccagcccggcctgtagcaaagcgccggccagcgtcggccccgcttccacccaaatgctgttcacctgctgtttaccaagctgcatcattagcaacacgaggtcgagatggccgttatgctccggccccagtagggtacgcacgttgtcaggccaggcacgttcatcggcatgggtgcgagcgaacaaggtttcaccttgctgctggataattcgatgctccggcgtgacgcggttttggctatcgatgacgatacgcagcggctgacgcaggttctcctgcggatagagcgcctgcgtatcggcgctcagctcctgccagcgcacggtcagcgccggatcgtccgccagcacggtcgcgctgctggtgagaatagcgtggctctgcgcgcgcaggcgctgcacgtcgcgtcgcgcctgtggcgaggtgatccactgactttcaccgctggccatcgccgtacggccatcaagcgaagcgcccatcttcagctggatccacggaaaaccggtgcgcatccgcttcagaaaacctttattcagcgcttccgcttcattcatcatcagcccatggctgacgtcaatgccggcctgctgcaggcggtacaggccgcgaccggccacctgtggattcgggtcctgcattgccgctaccacgcgagccacgcctgcggcgatcagcgcgtcgcagcacggcggcgtgcgaccatggtggctacagggctccagggtgacgtaggcggtcgcgcctttggctttatcgccggccatacgcagcgcgtgcacttcggcgtgcggctcgccggcccgatagtggaagccctcgccgacgatctcgccgtcttttacaatcacacagccgacgttgggattaggatgggtagtaaagcgtccgcgcgcggcaagcttcagcgctcgcgccatgtacatttcgtcctgcatggcttagtcctgtaaacgggcgatttcttcgccgaactctttaatatcttcgaaactgcgatagacggaagcgaagcgaatataggcgaccttatcgagcttcttcagctgctccatcaccagattaccgatcattttactcgcgacttcacgctcaccggtgccgcgcagatgggttttaatgtgatttaccgccatttcgacgtcatcggcgctgactgggcgcttttcaagcgctttcaacatcccgctacgcagcttgtcttcgttgaaaggttcgcgcacgtcgttgctttttaccacccgcggcattaccagctcagccacttcaaaagtggtaaagcgttcattgcagaccagacattgccgacgacgacgcacggaggagccttcgccgaccaggcgagaatcgatgactttggtatccacggcgaaacagaaagggcaatgcatggcgcgtcctgacaggtagttaatctgaaggatagtttaccctgaagtcagcggactacaaagaaagagcttttgagacaaaggatctatggtaggtcaattcagtttagctaccattaatcatcctctgtaaacggaatcctgaccatgacaagacgttacctacaactggctatcatcggcagcctgttcacccttaccgcctgcgcccagcaaagcgaagttcgtcagatgaacgagagcgtcagtacgctgagcaaagagatgacccagctgaatcagcaaacgataaaaatcacccagcaaaacgcactgaatgctaaatcaacccgcggcgtttatctgctgccggaggccaaaacccccgcgcggctggagagccagatcggcaccctgcgcatgtcagtgggtagcattacgccagatggcgacggttcgcgcctgaccttacgcatccagggcgagtctaacgatccgctcccggccttcaccgcgaccgtcgcttccggacaaattaccggcaccacccacagctatcaggaagtcaacgtccaggatcagctgattagcgccccggccagcatcctggcgcccagcgatgtggatatcccgctgcgcctgaatgtgacgcctgataaagtcggctttattcgtatccacgatatccaacccgccagcgcgcagtaagcgctcacgccgggcaaaacggcccggcgccccacttttcatctatcgaagttatccatttacaacttttcataagagttcattagaaatcgctcctgaaggcgattttcagtagcattttgtcaagaaatgcatagaatcgtgaacgcaatcgattacgcatgctctggttatgtgaaacaacacgtatttttgtgagcaatgatttctataatagacccccacagaaagacgaaatatttagcaacgcttcggcaattttcttaacgccttttggcttaatttaaacagtggcatcaacatgaaaaaaacattactggcagcgagcgctgttgtggcgctttccgcttctttcaccgctggcgcggcagaaactgaaaaaccgcagtacctgtctgattggtggcaccagagtgtgaacgtagtcggtagctaccacactcgttttggaccgcagatccgtaacgatacctatctggaatacgaagcgtttgctaaaaaagattggtttgatttctacggctatattgatgcgccggtcttcttcggcggcaacagcacggcgaaaggtatctggaacaaaggctccccgctgtttatggagatcgaaccgcgtttctctatcgacaagctgaccaacaccgacctgagcttcgggccgttcaaagagtggtacttcgcgaacaactatatctacgatatgggccgcaacgactctcaggagcagagcacctggtatatgggtctgggtaccgacatcgataccggtctgccgatgagcctgtcgctgaatatctatgctaaataccagtggcagaactacggcgcctccaacgaaaacgagtgggacggctaccgcttcaaggtgaaatacttcgttccgctgaccgacctgtggggcggttcgctgagctatattggcttcaccaacttcgactggggttctgaccttggcgacgacaacttctacgatatgaacggtaagcacgcgcgtaccagcaactctatcgcgtccagccacatcctggcgctgaactacgcgcactggcactactctatcgtcgcgcgttacttccataacggcggccagtgggctgatgatgctaagctgaacttcggcgacggcgacttcagcgttcgctctaccggctggggtggctacttcgttgtcggttacaacttctaattgctgatacagcaagacagcgcccgggacgcgttttacgcttaccgggcgtttttttatcgctcctcacatctcaccttacgtaagaaatcgctcagtgaacggtcggcgcactcgctgaaacgacgttcgatcaccttcacctccagacaacgatcgagacgaaagttacgataatcactgcgcagttcgcaccaggccaccagcagccaacgctccccccagaaaaatagccccagcggcagcacttcacgccgcgttacctgaccggattcatcctgatagtgaagctgcaacacctgctgattggatacggcctgatggataacgtcaaaataggttttagcataacgatgcgcgccaaggtcaggggcaaacagccgggtctgctccgctttgcgccgccggtcttccggcaaaatcgccagcattttttcctgagctgactccaacgactgcgaaagcgcatctccgccccaggtcttcagtagtcgaatcgcggcgattagcgcttcggattctttgctggtcagcatcagcggcggcagatcatagcccgccagcagacgataaccgctcccggcctcgccctcaaccggtacaccggagagcgagaggtcgcggatatcgcgatagacggttcgctccgacacgcccaaccgctccgccagcagcgccgcggtggttagccgcctgccgcgcaggatctgtacaatctgaaataaacggtcggcgcgtcgggtcatttctcgtttcgctaaatagtcaggttaagccggttgatgcaaacctacgcggttaccttcgctgtcggtaaacagggcgatggtgccaatatcattcggcagcgccagcgggccaaatacgcacgctcctcccgccgaggcgatacgatccagcgtggcggccaggttgtcggtatgcagataaataatagcgccctgcggcgatggcgcgataccgtcaaatttagccaacgcgccgccgggggccggatcctgatgcgggaagacggccaggtccgcacaatccatggtttcacgacgcagcgtcacctgcattaccggctcataaaacgcgacggcgcgatccatatcagcgaccggaatttcaaaccagttaatcacgttattcatacttcctcctgctcgttagtgagttcagaagcagtgtacgagagggctcctgacagcatactgtcagcaggtttcaggcaggcaaaaaaaatcccggccatcgaggccgggattgctttatctcaactgaactctattacggcagaatagacggctgatccgccccttctttttcgaccttctgctggatcagatgctcgcgcttcatgcccagtttcaacgccagtgcggacgcgacgtagatagaagaagccgtaccgatggaaacaccgatcagcatggtcagcgagaagccttccagaatcgggccgccgaagaggaacagcatcaggatcaccatcagggtggtaccggaggtgatcaaggtacgatgcagcgtctgggtcaacgacacgttaaagatttcgtacggcgtaccgcgacggatcttacggaagttttcacggatacggtccgacaccacgatactatcgttcaacgagtaaccgatgaccgacatcagtgatgcgacgatggtcaggtcaatctcgatgtggaacaacgacagtacgcccatggtaatcaccacgtcgtgcgccagtgcaataacgacccctgccgccagtcgccattcaaagcggaagccgacatagataaggatacacaccagcgccgcaatcagcgccagagcgccggtttgcgcaaggtccgcgcccacgctcgggccaacgaactcaatacgtttcaccgtcgcgctttggctggtcgattcgttaatcacgttaacgactttgctgcccagctcctggctgccgttggcatcgtgtaccggcggcatacgcaccatgatgtcgcggctgctgccgaagttctgcagctgcggctcctcaaaacctgctttctgcagcgaatcgcgcagctggtccatatcaaccggtttttcgagggtaatttcaatcaccgtaccgccggtgaaatcgagaccccagttaaacccgcggacgccgatgatggcgatcgacacaatcagcagaaaacctgaaatgccgaaggcccagtagtcccagcgcataaagtcccagactttacggccgtggttcaattgttcaacagtatattcctgtgccacaacgcactcctcagatagacagctttttcacgcgcttgccgccgtacagcaggttcacgatggcacgggtgccgacgatagcggtaaacattgaggtcgcgataccgataccggtagtaatcgcaaaccctttaatggcaccggtaccgaccgcgtacaggatgataaccttaattagcgtcgtcacgttggcgtcgaagatagagctaaatgcgcccttataaccttcgtcaatcgcctgctgaacggtacgtccgttgctcagctcttctttgatacgctcgttaatcagtacgttagcatcgaccgccaccgcaagggttaggacgatacccgcgatacccggcatggtcagcgttgccccaggaatcagggacataatgccgacaatcagcaccaggttagcaatcagcgcggaggtcgcaatcaggccgaacttcttatagaagaagatcatgaacaggatagagaccaccagaccggccagacacgcttccaggccctgcttgatgttctgcatacccagagttgggccgatagtacgttcttcaacgatctgaatcggcgcaatcagggcgcccgcacgcagcagcagagaaagctgacgcgcttcggtcgggttgctgataccggtgatacggaagctattgccaaggcgagactggatattggcgatgttaatcacctcttcctctttcgcaaggatagcgcgaccgttggcatctttcttaccgctgtctttgtactccacgaacagggtcgccatcggtttaccgatattgtccttggtgaagttagacatgatgttgccacccgcgctatcgagcgagatgttaacctgcggctggttgtactcgtccatgctggaagtggagtcagtgatatggtcgccggtcaggatcacgcgcttatacagcaccaccggacggccttcacgggtgtctttcacttccgaatcgccaggtacgcggccagaagcggctgcggactgatcgacgttggtgttcaccagacggaattccagcgtcgcggtcgcgccaaggatttccttcgcacgcgcggtatcctggatacccggcagttcaaccacgatacggtcggaaccctgacgctgcaccagcggttcggcaacgccgagctggtttacacggttacgcagaatgttgatgttctgctgaacggcgtattcacgggcttctttcagacgttcgtcggtcatcaccgctttcagcgcattgttaccctggcttgaaataaccagatcgcgatggcgcgggctgagataagagatagcctggtcgcgcgccgcgctgtcgcggaagacgatgctcagaccgtagttgtcttccttacgcacggtggagtaaggaatgcctttgtcacgcagctcgctgcgcaggctatcgatgttttgttcctgcagtttgcctaatgcggtgtccatgtctacttccatcaggaagtgcacgccgccgcgtaggtcaagacccagcttcatcggctcggcatacatcgccgccagccagcgcggggtagcaggagcaaggtttagcgccacgacgtatttgtcacccagcaggttaaccagcgcttcacgcgctcgcagctgagtgtcggtggtgtcgaagcgcgcaagaattgcgccctcttccagtgccacagacttcgcggtgattttttcttcttgtaaagttttctggacctggatcagcgtttgctcactggcggcgacgccgcgcgcgccagtgatttgaacagccggatcctcaccatacaggttgggaagcgcgtaaatcaggccgacgataatcacgacgaccagcatcacgtacttccacaaaggataacggtttaacacggcagttcccttagggaaaatggtaattacagcgccttcatggtgcctttcggcagaacggcagctacgaagtcacgtttgataaccacttcggtggtatcgttcagcgcgatagcgatgtagccgttttccgcgactttagtcacacgaccaaccagaccaccgttagtcaggacttcatcacctttggcgatggagttcatcagattcttgtgctctttagtacgtttctgctgtgggcgcaggatcatgaagtaaaaaatcagaccgaacaccaccagcatcagaatcagagacattgggctgccctgcgccggcgcgccggttgctgctaccgcatcagaaataaaaaagctcattgaaattccctcattattaaaattaatcaacgttcaaaggaggaacggaacgcccctgacgttggtaaaaatcggtcacgaagctctctaatttaccctcttcgatagccttgcgtaaaccagccattaaacgctgatagtagcgcaggttatgaatggtattgaggcgcgcgcccaatatttcgttgcaacgatcaagatgatgcaagtaagcacgtgaataattgcgacacgtatagcaatcgcactcggcatccagcggcgatgtatcgcttttatgcttcgcgttgcggattttcactacgccatcggtcacaaacagatggccgttacgcgcgttgcgcgtcggcataacgcagtcaaacatatcgatgccgcgacgtaccccttccaccaggtcttccggtttcccgacgcccatcaggtatcgcggtttatctgccgggatctgcgggcaaacgtgctccaggatacggtgcatgtcttccttcggctcgccgacagccaaaccgccgacagcgtagccatcaaagccaatctctaccagacctttcaccgagatatctcgtaaatcttcgtaaacgctgccctgaatgatgccaaagagcgcgtttttgttgccgaggccatcaaaacggtcacggctgcgcttggcccagcgcagagacatttccatcgaacgcttagcgtaatcccagtctgccgggtacggcgtacattcgtcgaagatcattacgatatcggaaccgagatcgtactgaatctccatcgatttttccggatcgaggaaaatcggatcgccgttgatcggattgcggaagtgcacgccctgttcggtgatcttacggatatcgccaagactgaagacctggaaaccgccggaatcggtgaggatcggccctttccactgcatgaaatcatgcagatcgccgtgcagcttcatgatttcctggcccgggcgcagccacagatggaaggtgttgccgaggatgatttgcgcgccggtggcttcaacttcttccggcgtcatccctttgacggtgccgtaggtaccaacgggcataaaggctggcgtttcaactacgccgcgatcaaacaccaaacggccgcgacgcgcgcggccatcggtggtatcaagttcaaatttcattattgctcctgcgtcagaaaaacagtccgacgtttaaatactcgccacggaatgattccgtggctaaaaaatgcgtcaaggcgtcagaaagccggcgtgccgggctttttagggacgctcagaaatagcctgcggattgtacgtgataaacatcgcgtccccgtagctaaaaaagcgatatttttgttctaccgcagccttataggcgttcatggtgtgctgatagccagcgaaagcggagaccaacataatcagtgtggattcagggagatggaagttagtcaccagcgcatcgatgactttgtactgatatcccggatagataaagatctgcgtatcggcaaagaacggctcaatcaggccatttttagccgcctgcgccgcgctttccagcgaacgcacggaagtggtgccgacggcgatgacgcggttaccgcgcgctttcgccgccagaaccgcatcaaccacatcctgcggcacctccgcatattctgagtgcatgatgtgctcttcgatgctgtcgacgcgcaccggctggaaggtccccgcgccaacgtgtagcgtcacaaacgccatctcaatgcctttagcgcgcagtttttccagcagcgggtcgtcaaaatgcaggccggcggtcggcgcggcgaccgcgcccggcttggtgccgtaaactgtctggtacagctcgcgatcggcgtcttcgtccgggcggtcgatatacggcggtagcggcatatgaccgatgctgttcagaatatcgagcaccgggcgctcatcgttgaactcaacttcaaacagtgcgccgtggcgcgccagcattgtggcgttaatgctttcgtcatcgcctaacagcagctccgcccccggtttcggcgctttagaggcgcgaatatgtgccagaatacgtttatcatccagcattcgctcgaccagcacttcaatcttgccgccgctggctttacggccaaacagacgcgccgggatcacccgggtgttgttaaagaccagcagatcgccagggttgagcttatcgagcagatcggtgaaagtaccgtgcgtcagcgcgcccgtcggcccgtccagcgacagcaagcggcagctactgcgctccggctgcggatagtgagcaatcagggattcaggtaattcaaaggaaaaatcggtaacgcgcatgacgatgactcagactaaataaagaggcgggtagtctagtgccgggcgggtcttcctgcaaccgttaccctattcaacgctggatataatagcggaataccatgattaaccagcaagaacgccatgaccctgtgaaggattgaagttgatatgaattttctcgcgcatttacacctcgcccatcttgcggatagctcgctgccgggcaacctgctggccgattttgtccgcggtaacccgcagggcgagtatcctgaggatgtggttgacggcatttatatgcatcggcgtatagatgtaatgaccgacaatctggcggaagttaaaacggcgcgcgaatggtttcgccccgagacccgccgcgtcgcgccaatttccctcgacgtcatgtgggatcatttcctgtcgcatcactgggcgcagctgtcgccggatctgccgctaaacgagtttgtgcgttacgcccacgcgcaggtagcgcaaattctgccggattcgccgccgcgctttgttaatctcaacgaatatatgtggtccgaacgctggctggaacgttatcaggatatggaattcattcagcgcgtcctgaacggtatggccagtcgccgcccgcgcctcgatgcgctgcgtgattcatggtacgaccttgataaccactatgggcaactggagcagcaattctggcgtttttatccgcgaatgatggagcaggcgaaaaagagaacgctgtaaaaccttgcgctttctcacaaaacgattattctgaaagcgctattgaataattatcaataggcaaaatctatctcatcgattgtcagcgccgcattgagttcctgcccgcctctgcctatactggcccgcgttgcgttccaattaaccttagtaataacaggagaatcatatggttctggttactcgtcaggctccggactttaccgctgcagcagtattaggtaacggcgaaatcgttgagaaattcaacttcaaacagcacaccaacggtaaagctaccgtcctgttcttctggccaatggacttcactttcgtttgcccgtctgaactgatcgctttcgacaagcgctacgaagaattccagaaacgcggcgtagaagtggttggcgtttcctttgactccgagttcgttcacaacgcatggcgtaacaccccggtagaccagggcggtattggcccggttaaatacgcgatggttgccgacatcaaacgtgaaattcagaaagcttacggcatcgagcatccggacgaaggcgttgcgctgcgcggttccttcctgatcgacgctaacggcatcgttcgccaccaggttgttaacgacctgccgctgggccgtaacatcgacgaaatgctgcgtatggttgacgcgctgcagttccacgaagagcacggtgaagtttgcccggctcagtgggaaaaaggaaaagaaggtatggccgcttctccggaaggcgtagctaaatacctgaccgaaaacgtatccagcctgtaatcggttagacgtttccataaaaaggctcgcaaatgcgagccttttttgtgcctgttatattcgctgttagcccggtaagcgcagcgccaccgggcaaaagtatcagaacgcgaagcaagaacagcctaatacgccccagaaagcctgctcatccgccaccggaatcgacgacttgcgcgcaatatcatgctgatgtccgtgcacgccgcagctgccgcagcactggtgcatctgcaccaccgcgccaatcttcgcggccgcaggcggcgccgagcgataatgccctggcacttttaccaccggcgaccactccggcaataccggaattggcggcggtgccagcggcgagaaatggccggccgcgtacaccaccttgccatcaacgatggtcaataccgactcaatacctttaatttcctcttccgcaacgctgaagtagtcttttgacagcaccaccatgtcagccagttgccctttctcaatgcgtccttttttaccctgctcgctggagaaccatgcgctaccggcggtccatagctcaagggcaacgtcgcgcggcagacggttgttatcgtcgtacatcgccatgccgccgacggtacgcccggaaaccagccagtacagcgcggtccacgggttataactggcgacgcgggtcgcatcggtacccaagcctaccggtacgtccagttccagcattttcgccaccggcggcgtatgtttcaccgcctctttgccgtagcgatcgacgaaatactcgccctggaaagccatccggtgctgcaccgcgataccgccgcctagcgccttcacgcgttcaatattacgttcggtgatggtctcggcgtgatcgaagaaccagtgcaggccgttaaacggaatatcgcggttcaccttctcgaacacatccagcattcggctaatcgactcatcgtaggtggcatgcagacggaaaggccagcggtgttccaccagatgacgcaccacccgctccagctcatcttccatgccttgcggcagatccggccgcggctgcaggaaatcttcaaaatccgccgccgagaagaccagcatttcaccagcgccgttggcacggtagaaatcggtgccctgccccggcttcagcatgtcggtccagcgctcgaaatcttccagctcctgcttcggccgctgggtaaagaggttataggcgatacgcacggtcatctgctctttggcgtgcagttgctcgataatttcgtaatcttccgggtagttctggaaaccaccgccggcatcgatggcgctggttaatcctaaacggttcagttcgcgcataaactggcgcgtggagttgacttgcagctcaagcggcagcttcggtcctttggccagcgtcgcatacaggatcatggcattaggtttggcgatcagcatcccggtcgggttgccgttgttatcgcgaacgatctcgccgcccgccgggtccggcgtctctttggtatagccaacggctttcagcgccgcgcggttaagcagcgcgcgatcgtacagatgcagcacgaataccggcgtgtcaggtgccgcttcattcagctcttccagcgtcggcatgcggcgttcggcaaactggaattcgctccagccgccgaccaccctcacccactgcggcgacggcgtgcgatcggcctgatcttttagcatacgcagcgcatccgccagcgatggcacgccttcccagcgcagctcgaggttatagttcaggccgccacgaatcaggtgcaggtgggagtcgttaagacctgggatcaccgtatggcctttaagatcgacaatttgcgtcccctcggcggcgaacgtcatgattcgatcgtggcttccggtcgcgagaatttttccatcggcgatggccacggcttccgccagtgggttcgcgcggtcgagtgtatgaatctgaccgtgggtcagaatcagtgtggcagtttgcgacataacgcactcctttaagcgggttgagctagttttttttcaaccaaccggcaaacagacgggtcacgataggcatccacaaccagaccaccaacgcgaccaccagggcatcgttaatcagatgcagtaacaagcttccccgtaactccggtagcgccatgccggtcagccatggtaccaggttggtacttgggaagatgaccagcagggttatcaggaactgtttccagcgcagcggctggcgaatattggccgcaggcggggtaaaccagaacgccggttcggtgcggatttcggtacgatcgccatcattgagaaacggcgcgatttccgcgactaattcacgacgggtttccgactgcgtccaggcgtagagatgttcaatggtgtcgaagcgaattatcacgctccagagattttgcccggccgccggacggatcacgttggcgccaagatggccgggaaactccgccgcaaccggcatgattttgcccaaccatgcttcataccgctggccgttttgtggatcgagatgatgactgatgaccagcgtcactgatttctgttgcgccattaagagttccttgcttcaggggaatgacgggatttctcccgccatcaggcataaatgacaatacacaaaatcattcatgccgcattgaggcggcaagattgcccgccctcgagcgctgacatcagccagtgaccggggcgggcaagcgaagccaacaaagaggcagcttgcaggatgaagtgttttaggctttacgttccggcgcgccgtgcaccatggtataagcataatccacgcccataccgtaggcgccgctatgttcgcgaaccagatccatcaccgcgtcataagtctctttacgtgaccagtcgcgctggtactccagcaggacctgctgccaggtcaccggtaccgcgccggcctgcaccatacggtctatggcgcgctcgtgagcgtcaacggaggtaccgccggaggtatcggttaccacgtacacttcataaccttcttccagcgccatcagcgccgggaaggtcaggcacacttcagtccacagcgcggaaataatcagttttttacgtccagtggctttcaccgcattaacaaaaccggtgtcttcccaggagttcatagaagtacgttcaatcggtttcacttcaggatgaaccgccagcagttctggccagatatagccgctgaagcttttggtttcgacagaggtataaataaccggaacgttaaaaatcttgcccgctttggccaacgcgacggtgttatttttcagcgtctggcgatcgatattggccacaccaaaagccatttgcggctggtggtcaataaaaataagggtggaattagacggatcaatcagttcacgaatagacataacacatcctattaatcaattagttaggaagataatacactgccgttgtgctgtgctgattgtggccaataacgcatgatgagtatagtcagtaatttctaacgagttattaaagaaatctttccgttttaattcacttgagtaaaaatagtgaccgtttgaataattaaaaaaagactaatcaaaaaattaatgggaactgttctaatttattcactggaattgaacatcggccttcggtaaaacaacgttattattagactggcggatcgagactaatgcgtttaaaccttgatgtacttttgattcttgatgctctggataggcatggctcgttcgcgctggcggcggagtcgctatttaaaacccccgccgcgctgagctatatgatccaaaaactggaaaacgatctgaacatcagtctgctggatcgttccgggcaccgggcgaaatttaccgataccggtaaaatgatgctggaaaaggggcgcctgctgctcaatgccgccaacgatctggaaaaacaggcgcagctgctgagttccggctgggagcgggatctggcgattgcgctggacgactcttttcctttccgggccctattgccgctgattgaaaagttttacgcgcaatatccgcaaacccggctcaactttacccaccataccctggcgggctcgtgggaagagctgactcacaacggcgcggatattattcttggggcgattaacgaaccgccgacttcagcggaatggtcgtggaaaatgctcggcgcgatggacaacgtgttcgttgtcgcgcccggccacccgctggcggcaacaacccagccactgaccaacaaacaactcagcctgcatcgcgcggtggttattagcgatagcgcccgctactgtcatccactgaacagcaacctgctcgatgagcaggagcaaatccgggtagatgatttcgccaccaaagtcgcgctcctgcgcgccggtttgggatgcggattcctgccccgccacatcgccctcccgtggctggagagcggtgagttgctggagaaaccggtgatttcgagccgtgagaaagatataacctatatggcctggcgtagcggcaataacggtctggctcagcgctggtggcgagaggctattctcgaagacagctgtctgagccagctctaccgttaacggctacaccagacgcttgcggaaatcgcgggcaaactcagcacatcatcgtgcatctcgcccgcgccttcttttcgctgccacgttttcccctccagcaaaggcgatgcgtcgattaccacctcgcaggcatgaccacggtttatcgccaccagcacccgctgctgtttgtaaacgcgaacaaagaccaccacgttatcttccgcatagatgacctggcagccgccatagcgcagcgcctgatgccccttacgcaaggtggtcatacgcttatataacgccaacaagttttcatcctgcagcgccggatcccatggaaagggtttacggcagaagggatcgttgttgccatcgacgccgacttcgtcaccatagtaaatacacggaacgcccggccagcagaacagccagaccaccgccagcggcagtcgcgccacatccttacccagcaaggatttaaaacgcgcggtatcgtggctgtccagttggttaaacatccgcaattgctgctgatgcgacagcccggcgcgatagttgtccatccacgccatacaggtttgcgcatcgatgtgctgcggatcgtaggaaatatcggtattggcgaggaagccccacagcgggaaggtaaaaccgcgatagttcatcgccgcgtcttcggcatcagcctgcagccactgacgcgcatcgccaaaatgttcgccgaatacaaaagcctccggctgctcccgcttcgccgcctgggtaatgccggcaatatggcgcaagttattacgcgcgccgccatcctcgcccagcatatgcaccacgtccagccgccagccgtccatactccacggcgcttttaaccagtggcgcaccacgctgtcttcgcccgcatagatttcgttaaccaggctcgatgaacggtagtcaagttttggcagactggcgtaacccagccagttatgcgccaccccgtccggggaaaaattaaaccactcacgccacggtgaatccggctgatggcaggcgccgttgctcgcctgctggtggcgatcgaaccacgggtgcgagtcaccggtatggttaaacacgccgtcgaggatcaggcgcatcccttcacgctgcgtattgtggcgcaggcgcatcagcgcggcatcgccaccgaactgcggatcgacacggcggtaatcagcggtatcgtatttatgtacgctgggcgcgacgaataccggattgagatacagcgcagtcacgccaagctgcttcagataaggaagcttctcgctaataccgtcgaggtcgccgccataaaaggtcgaaccgcccgcctcgccggttaacggctcatcccacgcttttagcacaatatcctggccggccgcatggtggtaataaacctcgtcctgcccggcttctcgcgcctcgctacgggcgaaacgatcggggaaaatttgataaaagacctgatcggcgacccactgcgggccgctatccggcacatcaaccgcaaactgctccagcctcgcgggcgggaaacgctggaatccctgcggcgtaaaccacaactgacggtccgcccacagcagcttaaagctatagcggcggcgcggctggccgttcatcaggtttatctctccacgccaggcgacgacatcggcgtgtggggattggcgcaggcgctgcatgggcaacgacagctcttcattgtcttcttccgcgcgcagcgtaattcgctgcggcattgtttcgccgcttagccacaatgtgataacgagtcgttcctgctgctctttaataaaaggagcaaccggcaggtgccaggccttcaacatcatcattcctctttttgcgtaatggccacaccttgccacagtgaacaggcgtataactcatcatcaatagaataattgggggaggagaaaggaggaggatgtgattttccgggccgcggctaagccggacccggaagagtggagaattactgcgcctgggctaactggcgatcgcggcgggtcttaattttccagccaaccagcagcagcacgatccacgcaaagccgacgtacagcgaaatgcgggtatccggatggtagccgataagcgcgatgataaagaccaggaacagcaggccgaccacggtggtggccacgccgcccggtactttaaacttcagcgctttcacctcttccggcgacaggcgacgacggaaagcgatttgcgacaacaggatcataatccacacccacacggtggcgaaggtcgccagcgaggcaatcaccaggaagacgttttccggcatgatgtagttgagatagaccgcaaacagcagcgccacggtcatcaccagcaccgtcacccagggcgtaccgcgacgcgacgttttggcgaacaccttcggcgcgctcccctgttcggccattccgtgcagcatacggccaacaccaaatacgtcgctgttaatcgccgatagcgacgcggttaacaccacgaagttcaggatgccggcggcaaaggtaattcccatatgctggaaggtcaacacgaacgggctgccgtttgtgcccaccaggttccagggatagatagacataatgacgaacagcgtccccacgtagaacaccaggatacgcatcggcaccgaattaatcgcccgcggaatggatttttccggatccttcgcttcaccggcggtgataccgataatctcaatcccgccgtaagcgaacatcaccatctgcagcgacatcaccattcccagccagccgttactgaagaagccgccgttactccataagttatgaataccggttggctgaccgccgttgccaataccccagatgatgatgccgaaaccggcaaggatcatgattataatcgtggcgactttaaagaatgagaaccagaactccagttcgccgaacaccttcacgctcatcagattgacggcgcagataatcagcaccacgctcagtacccatatccagtgcggcaccgccgggaaccagacgcccatatagataccgaaggcggtcacgtcggcaatcgcgacgatcaggatttcaaaacaataggtccagccggtgatatagccggccagcccgccgaggttctcctgcgcataacgcgagaaagagctggcggaagggttatgcaccgacatttcgcccagcgcgcgcatgatgatatacgccgccacgccgccgataatgtatgccaacaatacgctcggccccgccattttaatggcgtctgccgaaccatagaacaggccggtaccaatagcggaaccaagggccataaagcgaatgtgccgggtacttagcccgcgcttaagcttgttactactttccatcgtgttccatgccgtttttctcgtttgtgctttgcgggggcaaaacgcaaaagggaatgaccaaaaaaacaaaaaaccacgggaccttaagtcccgtggttaaacacctgcgtaaagcgtcggttagtgggcttttgagaccaccgggctacccgctgcgcgatcgatgatcgcagccagcacagccatcaccgcggttggcagcaaccatgccagaccttgcgctgccagcggcaggctcgcggtccattgcggcaggatatctgcgaacgccgatgctttaacaccgtcaatgataccaaacatcaggctgataaacattgccggcgcgataacgcgggaggaattatgccaccaaccgcgggtaaagcttaataccaccagtgcgatacacggcggataaatagcggttaacaccggaatcgagatctgaatcagatggctgagccccaggttagaaaccgccatggagaacaggccgagaataaacaccagcgaacgatacgacagcggcagatactgcgcgaagaactcagcgcaggcgcaggtcaggccaaccgcggtgaccagacaggcgataaatatcaatgccgccagcaggaagctgcccgcgccgccgaaggtatgctgcacgtaggagtgcagaatagccgcgccgtttgccgactgatcgaccagcgtcgcgctatcggaacccaggcggaacagcgccaggtacagcagcgtcaggcccacgccggccatcagaccagcccagacggtgtatcgggtcaacaatcgggcttcgctaacgccgcgggaacgcgcggcattgacgataacgataccgaagaccatcgcccccagcgtgtccatggtcagataaccattgacgaaaccattagaaaacggcgcggtacgataggcttccatcgcgtcgctaatcgggccggccggccagataaccgcggccaccgcgagcacgaccagggcgataattttcagcggcgccaggaaattgccgacggtatccagcagtttgcccggatagagagaaaccagaatcaccagcgcgaaatagataacgctatagataagcagcggcagcgcgccgtcgccggtcagcggagcaatccccacttcaaatgaaacggtggcggtacgcggggtcgcgaacagcggcccaaccgccaggtagcacaccacggccagcagaatgcccgcaactttgccgattggcgagctcagacgctcaacgccgccgccgactttcgccagcgcgactaccgttagcaccggcaaacccacggcggtaatcaggaagccaatggctgcggtccagacgtgttcgccggcctgtaagccaaccatcggagggaagataatgttgcctgcgccaacgaacagcgcgaaggtcataaagcccagcgcgatgatgtcgcgagattttaactgatgggtcataaattcattactgcctgtggatgtggtgttgtaaaaaacggaaaaataccgtgccttcctttcgggatgatacagcggccattgcctgtaaactcagcgagatatgctctcgaagcggcgtggaaaagaattgttttttgaattaccacgcaaaagcagtcttaccgggactgcatagggggcaatttaaacgcttataacgttttaaagcaaggtgggatcgtaaaaccagatgattatgctaactatgattttgaacctggattaattgaccatgacgacgcaaaacgcgtggctaatcatgcgaacaataaataaccaggcgttcgtttaatacgcaacgtaaagttgactgcaaatgaaaatgaccagccgaagctggtcattggcaaggaaagctgacagacgccgcgtcaggcgacatttttggcaattaaacgttccggcaacaggaagctaaagcgcgttcccttcccaaccgtactttcgatttccagccggctttcgtgatggctaaccgcatgtttcacaatagccagccctaaaccgctgccgccggtttgccgggagcgcgccttgtcgacgcggtagaaccgctcggtcaaccgggggagatgttcaggcgcgatgccagggccgttgtcctcaacgctaaacagcacgccgtgtggcgcccgctgccagctgacgtgaatctcagttcccgctggcgtatggttaacggcgttgtacaccagattggaaatcgcgctgcgcaactgctcttcgttgcccatcacctggagcgtttcgtcgacgctaaagtgcaactgatgcttaccctggctgagggtttgcgcctcgcgctcaaccacccgcagcatcatcgggacatcgattttatcattcatcgccagcaccggcgcggcttcaatacgcgagagcgtcagcaactgcttcaccaacccttccatccgctgcgtttgctcacgcatggtgtgcagcgctttttcccgcgtcggcccttccaacacctgctcctgcatcatctcgagataaccctgcagtacggtgagcggcgtgcgcagctcgtggctgacgttggcgaaaaagttgcgccgcgcgccttccagctggtgcatttgcgtgacatcgcgcgccaccatcaaccactgtttatcgctataaggcatcacgcgaatttccagatgacgggcattattgagcaccaaattaaggggcttggtgaaatcgcggtttttcagatagttagcaaactctgggtagcgcagcaggttgaggatattctgcccgctatcgtccggccagcgtagattaaggatttgttgcgccaggccattacaccagaagatggcgccctcttcggtggtcagcaccaccgcatcgggtaaggattccgccccgctgcgaaagcgcttgataaggcttcccagctcgcggcgacgttttttattacgcatctgcatttgatgcagaccatacagcagcggttcccaactgccgcttcccggcggcggcgtcatactgcgatcgacccacagccaccatgacagacgtaacaaattccagaaatgccaaataagcaacccggtcaccgccgccagtaaaaaccacggcagatgaccgaaaaatgccccgaggatcagggccggtatacaacataagaaaagctcaagcgccagccttttccatgacagccgttccagcacgggtcacactcctgtcaaaattcagaaacgggcggagaaacgatatcccgtgccgcgaaccgtctgtaccatccggtcatggccgctatgttccagcgctttgcgcaggcggcgaatatgcacatccaccgtccggtcttcaacgtaaacgttggttccccaaacgtgattcagcagttgctcacggctgtatacgcgttccgggtgggtcataaagaagtgtaataatttaaactcggtcggccccatatccagcgggttttcgccggtcatgacgcgatgcgaggaaggatcgaggctcagcccctgcatctcaatcacctcttcaaccgccattggcgaaatacgccgcatcaccgccttaattcgcgccaccagctccttcggcgaaaacggcttggtgatgtaatcatccgcgccggtttccagaccgcgtacgcgatcttcttcttcaccgcgcgccgtcagcatcaccaccggaatatcacgggtcatcgcttcgcgcttaagctgtttaataaactgcagccccgatccgcccggcaacatccagtcgaggagaatcaaatcgggccagggttcattgagttgattcaccgcactgtcaaaatcttccgcctcgacgggctgaaagccgttttgctccagaacaaagcagaccatttcgcggattggagcttcatcttcaacgaccagaattcttctcgccattatttaccctgtgttttttagccatcagtatagaagtgcgcggccattatgcgtcagatttgtgacagatttatgaaaaaatgaccgtctgatgaatgcggattttgaatgaggacacgcacttaacgcatcctgtctcgccgtaatagggcaaaaggaatacgggcggcgggatcaacgttataatggccgcctggcttttatcgcaacggaatttttatgcgcatccttcatacctccgactggcacctcggccagaacttctatagcaaaagccgcgcggacgaacacgccgcctttctcgactggctgctggcgcgcgcgcaggaacacgaggtggatgccattatcgtcgctggcgatatttttgataccggctctccgccgagctacgcccgcgaactgtataaccgttttgtcgttcaactgcagcaaaccggctgccagttggtggtgctggcgggcaaccacgattcggtagcgacgttaaacgagtcgcgcgaaatactcgccttcctgaaaaccaccgtggtcgccaacgccggccacgcgccctttatcttgccgcggcgcgacggcgcgcccggcgcggtcttctgcccggtgccgtttttgcgcccgcgcgaactggtggtcagccaggctggccactccagcggtgaaaaacagcagcagttgctcaccgccatcagcgactattatcagcagcaatatcagcaggcctgcgatctgcgcggcgaacgcgcattaccgatcattgccagcggccacctcaccaccgtcggcgccagcaaaagcgacgcggtgcgtgaaatctatatcggtaccctcgacgccttcccggccaatcgcttcccgcccgccgattacatcgcgctcggtcatattcatcgcgcccagatggtcggcggctgcgagcatattcgctacagcggttcgccgctgccgctgagttttgatgaaaccggaaaaaacaaaagcgttaatctggtctcattcaacgagggcaagctcagcgaggtgacgctgctgccggtgccgatcacccagccgctggcggtactgaaaggcgatttcgccagcatcagcgaacagcttcagcagtggcaggatagcgcgcagcagccgccggtctggctggatatcgaaatcaccagcgatgaatacctgcacgatatccaaagaaaaattcagcagcagaccgaatcgctgccggtggaagtgctgctggtgcgccgcagtcgcgcccagcgtgaacgcattctggccggcgttcagcgggaaacgctgagcgaactgcaggtggaagaggtgtttgcccgccgcctggcgctggaaacccttgatgctccgcaacagcagaggctggagcaactgtttacggaaacgctgcatagcctgaacggtgaggaacacctgtgagaatcctgagcctacgcctgaaaaaccttaactcgctgaaaggcgaatggaaaatcgactttaccgctgaaccgttcgccagcaatgggttattcgcgattaccgggccgaccggcgccgggaaaaccaccctgttagatgccatctgtctcgcgctgtaccacgaaacgccgcgcctgagcagcgtatcgcaatcgcaaaacgatctgatgacccgcgacaccgccgagtgcctggcggaagttgaatttgaggtccggggcaccgcctatcgcgccttctggagccagaaccgcgcccgcaaccagccggatggcaatctacaggcgccgcgcgttgagctggcgcgctgcgacgacgggaaaattcttgccgacaaggtcaaagacaaactggagctgacggcatcaattaccggcctcgactatgggcgctttacccgctcaatgctgctttcgcaggggcaatttgccgctttcctcaatgccaaaccgaaagagcgcgccgagctgctggaagagctgaccgggactgaaatttacgggcaaatttccgcgcaggtctttgaaaaacataaactcgcccgcattgagctggaaaagctgcaggcgcaggcctccggcgtcgtactgttaaatgatgagcagcagcaggcgttacagcaaagtttgcaagtacttactgctgaagaacagcagcaacttgccgaacagacccgccagcaaaatggcctacagtggctgcgccgccgtcaggagctaaacgcggaagccacccaggcgcaggccgctttacagcaggcgctgctggcgcaggaagccgccgcgccgcagctggcggctctacaaaccgcgcagccggcagagcaactgcgtccattatggtcgcggctgcaggaacacagtagcgcgctggcgcaaactcgccgtcaggttgaggaagtaaatactcgcttacagcacagcctgcgccgtcgcgccgggatccgcctggctgcccaacaacgtctggctcaactagaatccagccagcaatcgttaaatgagtggcttaaagcgcacgagcgattccagcagtggagcacggcgctggcaggctggaaagccaccttccagcagcttaaccgcgacgctcagcaagagctgacgctacaacagcgcctgcaggatgccagccgtaagctcggcgaattgccggccaccgcgctaaccctcgatgcgcagcaggtcagccgcgagctgacacagcatgccgccgcccgcccgctgcgccagcagctctcaaccctccatcgccagctgcagccgctgttcctgcgtctgcggcagctacagagcgcggaaaacgcctcacagcaggaaaaagagaagcttgaagccgcgctacaacagcgtcgtcaggcgtggaaggaaaaaaatcaacagctcagcgatgtaaaagccatctgcgaactggaagcgcgtatcgccgggctggaagccgagcgcgcccgcctgcagccgggcgcgccttgtccactgtgcggttctgaacatcatccggcggtcgcggaataccaggcgctggtacccggcatcaaccaaactcgccgcgacgcgctggagcgtgacgtgcgacagctggcggaagaaggcgcgcagctgcgcggccagcttgaagcgctgcttaaacaacagcaaaaagacgctgacgagaaaacatcgcttctgcagcaggagcaagcgctcacctctcaatggcaagccaccctcgcggaattagcgattacgctgacgccgcaggatgatattgctggctggctggatagccaacagcagcatgaacagcagctgtatcagcatcaacaacggctggcctggcaggcgcaacagcaggagagccagctgcagctgcagcagttacagcaggatctcgaacagcgccgtcgcgcgctgcaggcggagctggacgtttataccctggcgctgccgcctgccgcggaggctaacgactggctggcccagcgtgaagccgaaacccgcggctggcaggcgaaacaaaatgaagccgccgcgctgcaggaacagcgccagcagctaacgccgctgctggaaaccctgcctgagtcaacggaagccgcggatcccgcgccgctggagggctggcggcaggtgcatgatgattgcctggcgctacagagccagtggcaaacgctgggccagcaagaaagccagcagcaggcacaggtgaaggaaagcgaaaagcagtttactgccgcgctggccgccagcccgtttgccgaccaagcggcctttcttgccgctttgcttgacgagccaacccgccagcggctggaacaactcaagcagacgctggaaaaagaagttcagcacaaccaaacgctggccctgcgggcgcagacgtcgcttgaacgccatcagcaacagccgcccgccgatattgatattaaccagccgctggagcagctagagaataggctggagcaactggcacgccagttgcgggaaaacagcgcccgtcagggtgagatccgccagcagttgaagcaaaacagcgataaccaacagcgccagcaatcattacgtcagcagatggaacaagccacgcagcaggtcgaagactgggcctggctgaatgcgctcatcggttcaaaagaaggcgataagttccgtaaattcgcccaggggctgacgctggataatctggtgtggctggctaaccagcagctcaaccgcctgcatggccgctatttgttgcaacgtaaagccagcgaggcgctggagctggaagtggtggacacctggcaggccgacgcggtgcgcgatacccgcacgctttccggcggcgaaagcttccttgtgagcctcgcgctggcgctggcgctatctgacctggtgagccataaaacgcggattgattcgctattccttgatgaaggattcggcaccctcgatagcgaaacgctggataccgcgctggatgcgctcgacgcgcttaacgccagcggcaaagtgattggcgtgattagccacgtcgaggcgatgaaagagcgcatcccggtgcagattaaagtgaaaaagataaacggtctgggatacagccggttggaaaaagcgtttgcggtggagtgaagccttcccctctccccacaggggagagggaatgagatcacagcggccacagccatgccgcgccgcgtacgccgctggaatcgccgtgcatcgcccggcggatcggcgtttcgcattctccaccgaacacccactgtttcaccagccccggtaccgtttgatacaggcgttcgacattgctcatcccgccgcctaacacaatgacatccgggtcgaggatattcaccacatgcgccagcgatttcgccagcctctgttcgtagcggctcagcgccagttcggccttttcgtcaccttcacccaccaggcgcataatctcgctgccggttaacgggtttccgctcagccgctgatagtcggtggcgaaaccggtgccggaaataaaggtttcaatacacccctgcttgccgcagtaacaaggcacttgctgacgatagcgcagctcatcttcatccatccacggcagcgggttgtgcccccattcaccggcggtgccattgccgccgatatgcgcgcgcccgttcaacgccacccccgcgccgcagccggtaccgataattaccgcaaacacggtttgcgcacccgcggccgcgccatcgaccgcctccgaaaccgccaggcagttggcgtcgttggcaagccggatctcacgattgaggcgcaggctaaggtctttatcgaagggctggccgttcagccaggtcgagttggcgtttttcaccaccccgctatacggcgaaatcgagccggggatgcccataccgacggtgccgcgctgcccggtcgcctgctcggccatctccaccagcgaggcaatcgtctcgatggtctggcgataatcctctcgcggggttggcaagcggtggcgaaataactgctggccctgctcactcagggcgataacttctgtttttgttccacctaaatcaataccaatacgcacagtctgctcctcaccccgattaacaatgcaagcatagcgacaattcgctatcatgcccgcctgatttaacgacaaagccgtggaaattatcatgctgtggttcaaaaatttaatggtttaccgtctgagccgcgatatcgaattgcgcgccgaagagatggaaaaacagctggccgagctgacatttaccccttgtggcagccaggatatggcgaaaaccggttgggtatcgccgatgggatcgcacagcgacgcgctgacgcatacggcaaacggccagatcgttatctgcgcccgtaaagaagaaaagatcctgccgtcgccggtgatcaaacaggcgctggaagcaaagatcctcaagctcgaagccgatcagggccgcaagctgaagaaaacggaaaaagattcgctgaaagatgaagtgctgcactcgctgctgccgcgcgcctttagccgcttcagccagacgatgatgtggatcgataccgtcaacggcctgattatggtggactgcgctagcgcgaagaaagcggaagatacgctggcgctgctgcgtaaaacgctgggctcgctgcctgtagtaccgctgacgctggaaaatccgatcgagctgacgctgaccgaatgggtgcgctccggtagcgtggctcagggcttccagctgcttgacgaagccgaattgaaagcgatgctggaagatggtggcgtgatccgcgcgaagaaacaggatctggtgagcgatgagatcgccgtacatatcgaagcgggtaaagtggtcaccaaactggcgctcgactggcagcagcgtatccagtttgtgatctgcgacgacgcatcgattaaacgtctgaagttctgcgacgaattacgtgaccagaatgaagatattgaccgcgaagattttgcgcagcgttttgacgccgactttatcttgatgaccggcgaactggcggcattgattcaaagcctggttgaaggactgggcggcgaagcccagcgctaacgcgccaccttcctgccgggcccggaaagtggacgcggcaggaaggcgcttaaattacagataacggcacaggtaggaagtcggttccgccacctgcaggtggaattcgctattacccggcacgttaaacacttcgcctgccgcgtaaactttccattcagtttcacccggcaacagcacgttcagcgcaccgctgaccacggtcatctcttccggctgggcggtgccaaaggcgtattcaccctctgccatcaccccaacgctggcgcggccggtactgctgctggtgaagccgatagatttcactttccctgaaaaatactcattgctttgaagcataaacaagaccttatcatcgttggttgaagcttcaatatagggggcgctccttgcccctgtcacgcaaaattaatcgataacgtcgggttaaattaatagttctgccgccagtcgcgaaaccagcacatttgacaataataccgggacatctagcgccttttgtaatacgtcgcggtgatgctgatgatagccaagacagtcgagcaccagtacatccgccccctgttcgactaaacctcttcctgcatccagcagatcgctgtcgctgccgcccatcgggttcgccagcgcatagtaaggcgtattttctaaagtgagccacttttgccgctgcatgggcaggacttcttcaacgggtacaatcacgcccacctgatggccatcgacgatcgaggccaccagcggcggaataatccgttcaggctcaagaaggatagcgttgtgcgtcgccagaccgctcaactgttcggaactgagaagaagaatgacatcatattcctgccgatccagcatctcgataacgcagcgcagatcgcgctccaccttttggcgggagacttccaccagttggttatcattgagtaaggtcagcagcccctggtcgccggattccacggcataatcttccataacgtcttcacgcgtcattttacctaacaggctaatatgggtgatctgctcttccctgatatgttcggttaacagcggcaaaacttccgccaccggcgccacgccaatggtcaaaattgccatcgttgcactcatatcatgtaccttttcactaccactgcttcaacacaggcttttcacacacgacatccgcccccctggtgagtaaaaatcaaccgtcgagaagcgtagcagctcagcgccgctgcggaatgtaaagattccagaagcttcagagtcgctcctgaaaaatccgtgtgttaggtattcattagtaccattgatgaattaaaaatgtgagctgggcccggtattgccatcttcatgacgcaaaccgggccgggggattaggttttctcgggatcttcgtaacgccgtttggcgtctaacgcttcctgctcggagggatgctcgctgatcagcgaatcgggtgtcgggtaatccgcacgcagctgataccaggtgaccgtctgacccgcggcgcctttttcaacggcgacaacgcgggcttgtctcggataaggaggtctgtttggcattgttcttcctttttcggctgtcagaacaattaagtataggccccgctttcttccctgacccaggtaaaatcctaacttaccgtcacatcgcacagcatggtcataatctgttcaaccaccgcatccggcgtcgcggtggcgtctacggtatgatgggcggtttctcggtacagggcttcccgttgcgccagcacttcgccgacttcctcacggacaggcttaccggtcagcgttgggcgttgttccgactgcggataagcttccagccgctcaatcaaggcgttaacagaagcctgcagataaatcacaatgccgttttcacgcatatacagacgattgcgttcagcaagaataatccctccgccggtcgcaatcaccgtatccggcaacgtaacggctttcagcgacagcgtctccagttcacgaaagcgctcccagccctcttgttgcacgatttccgctaccgtgcgtttctcatgggcctgtaaacgatgatcggtatcggaaaactggaaatgcagcgcgcgcgccagggcatggccgatcgtcgttttaccgcagcctcgcggcccgatgagaaaaattggttgtgtcattaccgaagaccccctggttccgcgtgtcgcggagaaataaaggcgaaaagtacgccatgatacctgcaaatgtctgccacgataaccgtaaaataatcgttacattttttagggaaccctatttaccacagagtttgaatggattccgcatgtaaacttatcattgcatttagtgttatgccagctttacctaaagacgaaggattattttttatccatcgtttgccgtaaacggtaacacatttctgcacagctttacgctgcaacatatttacaacaccggcagaccgtcgcactctgacggtaaatgacccgtgtgacagaggaatgtatcatgcaatctgaagaacaacgccttattgatggcctgttttcccgtttaaaagaggccgagacgcacagcgcatcgcgcgacgccagcgccgaggagcggattgcccagcacgtaacccaacagccggcggccccatactatatggcgcaaactatcctgattcaggaagcggctatcaaacagcttaacgaccgcattcaggcgctggaggcgcaggttagccagctgcaggcggcaaaaccgagcagcggcgggttcctgtcgggcctgttcggcggcggccagtcccgcggcgccgatccgattccaggagccgagcaatatggccgcccgcagacgaataacgcacaaccgcagtatgcgccacagcaaaactatgccccgcaggcggcaggccgcagcggcggcggctttatggcgggcgcgctacaaaccgcggccggggtggcaggcggcgtggtgctggggaatatgctgaccaatatgttcagtggttcacatccgcaggagattgtgaacatcatcgatgaacagcagccgcagccgcaacaagatgtcagcccggcgctggataataacgccgctgaggatccgttccgccagcaggacgaccctttcctggcggacaataataccttcgactccgatttcgacgccggcttcggcaatgacgatgatttcggtagcgatgatgacagctgggtttaatcctgctggcgtttaaccgcaagcagccacttctccagctcggcggcgaataactgccgatcgcgctgcgataaactatccgggccgccggtctgtacgccgctggcccgcatcgtctccataaaatcacgcatcgtcaggcgctcgcgaatggtcgcctcactgtagcgctcgccgcgcggattcagcgccgcgcctcctttcgccagcacttccgccgccagcgggatgtcagcggtgatcaccaaatcgcccggttcacagagacggacaatctcgttatcggcaacatcaaaaccctgcgccacccgtagcgcgcggacgtaacgcgacggcggaacccgcagcgactggttggcgaccagcgtcagcggcgtctgcgtgcgttcggcggcgcggaacaaaatttctttaatgacattcggacacgcgtccgcatctacccaaatcgccatttcggctcctgtcgtcggcaaaggttgcgacattgtcgcctgcttttctcccccagaaaagcgccaggatgataagctagtgagatcgtaacgaaaaatgcagaggggaaaggtaatggataagaaaattggctttatcggctgcggcaacatgggtaaagccattctcggcggcctgatcgccagcggacaagtgcaaccggcgcaaatttgggtctataccccatcgccggacaaagttgccgccctgcatgaccagtacggtattaatgcggcggaaagcgcgcaggaagtcgctcaggtcgccgatatcgtcttcggcgcggtgaagccggggatcatgaccaaggtgttaagcgatatcgcttccagtctgaacaaagattcgctggtggtctcgatagccgcaggcgtcacgctggatcagctggcgcgcgcgttgggccacgatcgcaaaattattcgcgccatgccgaacaccccgtcgctggtgaacgctgggatgacctccgtgacgccaaacgcgctggtcagcgcggaagagatcgccgaggtgttaaccattttccgttgcttcggccaggcggaaaccatcgccgagccgatgattcatccggtggttggcgtcagcggttccgcgccggcttacgtctttatgtttatcgaagccatggccgatgccgccgttctcggcggtatgccgcgcgcgcaggcctacaaattcgccgcgcaggcggtcatggggtcagcgaagatggtgctggaaagcggcgaacatccgggcgcgctgaaagatatggtctgctcgccaggcggcaccaccattgaagcggttcgcgtactggaagaaaaaggtttccgttccgccgttatcgaagcgatggcgaagtgtatggaaaaatcagagcaactgagccgttcctgataagcctgaaagagactacgggtgaggcgccgccccacccgtcatcttatttcttcaggcaggtactcataaacttattacgatcgtcacccttcaacgatttcgacgccgcttctttgctacaagcgctcatcttctgctgttgaggcgtcagcgtcttgccggccgctggcgcatctttcttcaggcaattgctcataaaggttttacgttcatcacccttcagcgactttgacgccgcttcggtattacatgcgctcattttctgctgctgaggcgttaacgttttatctgcggcacttaccgcggcaacaaagaccaaaccaaaaagtagggttaccagaaatgttattttcatcacaccatccctctgttactggatctctgtaagtctggtcgctatcagcaaaaaaaccagccggtaacgtaaattcgttaccggccgcgggttatttcagacccagcgcgtctttcatggtgtaaaacagatcggtctggtcggtaagacccaccacgttgcccgcatgcgggccataggcggcaatacgcagttgggtgccggtgtgttccatcgactcttcttcagagttgccatagctcatcaccattaccgcgccatctttggtcgtcagcgcctgggtcaggcccggcgctttcgtgtctgccgggataatctggctggagtgggcgtgatcggcggtgacgatcaccagggtattaccctcttttttggcaaattccagcgctttctgtaccgcttcatcgaggtcgacggtttcgccaatctggccgcaagggtttgccgcgtggtcctgtttatcgatagatgccccctcaacctgcagaaagaatcccttttcgttgcggctcaggagatcaatcgctttttcggtcatctgcgccagcgtcggtacggaagcatcgcgtttcgggtttggggtacaggttaccggcggtttgtcgatattgccgtgataagaggctttcgggccttcccaccgcaccggcatattgccgtcggagaacagaccgagcagcggtttaccctgatttgcttcgctaatagcggcgagtgaagcggcgtcggtcacaatctgatagccgcgagcgaccgcctgctcatgcagggttttcccctgccactcccctgcggtcgccgtttcagcaaaggtcttcgccccgccgcctaaagagacatccggacgggcattcagcagttgttcggtgatagagcccttgccgcctttttccagcgcgttgctggcgcatttttcgctggtcacgctggggccatagcatttacgcgaggtcacatgcgccacctgcgccgccggcgtcgcatcctgcagttcagccgtcgagacattgccggtggcaagacccgcggctttcgccagctcaaggatggtctgatgatctttttcgtggatatcaacgcccagcgcgccgttatagcttttcacgccggtggtccacgcggttgccgaagcggcggaatccgtcacgtaatccggcttgccggtttttttatccagagaataatgggtgtattggcctgtcagcggcagggcatcaatacctttaaagaaaccgccggcgccttcggcataatttcgtgcggcggtaatttctgaatcacccatgccatcgccaatgagcaaaataatatttttcgccggcttattgattaacgaagcgcgcagcgcttcggtctgatcgcccgttaaacggcgcgccccgcctggggtcgtgatatcgccctgcgccgcgcgattttccagcaccggcgaagaagtggtttgtgcatgaataaccgggggagccagcagcggtaatagggcaataaagagggctgataatttcactttgtcgtctccatgtaaaaaatacttaaaaaacaaaacgagggagactttataaaagtggtgtgacagaaaaatgacagcatccttactggtcacatgattagttacgaggatgccggagcagcttttttatatattgctgcagaagctgggtgtcacggtcgtccaccagcggcccgggcttgacctgctccatggcggtttcgatatcctgaatcaaacgttgctgcgcatcctcagccatatggcgcagcaatgcggtgacgacaatttccagcgcctcaacctgtaccgtcagctcttttgcctcttcttctttttgcgccagattgaccaacagctcagcaatgagatttttcattacgcattatccttaagcaacatccataatggcctagttatgtcatacatcggcatatcgataccagaattattttcaaataatagggttattcctgcaataatattcagcgaaacgtttttattaccgccaggcaacaaagggaatgcccctattattaatagctaaaagataattctataaccaaatttaatagtaaataataaaatggaatatacgtcgcactatttaaggataactaaaggtaatggttaatagctatatcagctgattaatataaggcgcccttatgagcgcccaatatttttatttaaacggccgcgcggcggcttcggcgtaacataatcgccagttgccagatattaatcaggacaatcaacgcagtggcaataaacacccagcggaaacccgccattgccgagaccgaagcgccaatgagcggcccggcgacattacccagatacataaatgactggttataaccgaaaatacgcccggtgacgttatcgctgcagtatttcaagagcagcgtctggaccgccggtaacatcgcgccgtcggcaaagcccagcaggaagcgcaataccccgagctgcagcggcgaagtcacgaacgacatcgcaaagaacatcaccaccgcgcaacataacgtcgccagcagaatacgcgacgtcccgatgcgatcgccgagtttccccagccgaggcgcggaaatcaacgccgaaatccccggtacggcggcaatcatccccgcaagaaacgcgatgttgttactatccggcgccatcgacttgataaataacgccagaatcggcccgatagagccgttacacaactggataaccagggtggtgaaaaacaggctaatcaccagccccggatgggtcaatgaagcaaagaccgctttaccgctcaggcgttcagctttgctcatttgcggccgggcgccctctttaatcagaaacaaggtcacgaggaagctgaccgtcagtaaaatcgcggtaatgaaaaataccgcccgcaggccgacgtggtcggcaagaaaaccgccaagcagcgggccgccgatcacgccgcttatctgcgccgtcgacagcgtacttagcgcccaaccgctgcgttcacgcggcacctgcgaggccaccagcgccatggcgttgggtatatagcctgaggttagccccattaccgcacgcaaaataaaaagctgccaaacgttggtcgcaaaagcctgtagcaaaatcgctatcgccatgccaagggaggcgcgcagcagcatcagtttgcgccctttgcggtctgccaggctcccccacatcggcgagacaatcgccgacaccaggaaggtgacgctaaaggtcaagcccgaccacatcgacagcgcttgatgtgaggtaacgcccaactgagagacatacagcggtaagaagggcagaatttgactgatggcgagtccggtgaaaaaacagccgaaccagacagaaatgagattaaccttccaggattccataactacgcgtattcattagtgtttcgttaattattacctagcttagcaatttccgtctccgcacgtagcaccagagatgcgcatgccgcgagtttggtgttttatcgccctgaccgcggagtagacaaacataatcgaagataaccgcattctcgtcagtgcgatgtgctgaggctcatcggcggatagcgacgaatgcgccgcatttaaccctctgcagcatagggtaaagattcaggcagccatctcgctaaaacacatgctatgttatgtgttttgatgtaatcaggatggaagttgaaatggctaaaatgagggttgggatcgtttttggcggtaagtcggcagaacatgaagtgtcgctgcagtcagccaaaaatatcgtcgaagcaattgataaaacgcgctttgatgttgtgctgctgggaatcgataaacaggggctttggcatatcaacgatgccagcaactatctgctgaacccgcaggatcccgcccatatcgcgctgcgcccatcagacgtgacgctggcgcaaattcccggtcgcgatgcccatcagttgatcaatgccgatagcggccagccgctggcggccatcgacgttatcttcccgattgttcacggcacccttggcgaagatggttcgctgcaggggatgctgcggatggcgaatttgccgttcgtcggatccgatgtgctgggctccgccgcctgcatggataaagacgtcactaaacgcctgcttcgcgatgccggtctgtcaattgcgccgttcatcactctgactcgcgccaaccgccagcagttcagctttgccgatgtcaaagcgaagctgggtttaccgctgttcgtgaagcccgcaaaccagggttcttccgtcggcgtcagcaaagtgaagagcgaagaagagtacctgcaggccgtcgcgttagcctttgaattcgaccataaagtggtagttgaacaagggattaagggccgtgaaatcgagtgcgcggtgctgggcaatgattatcctcaggccagcacctgcggggagatcgttctcaatagcgaattctatgcctacgataccaagtacattgatgacaaaggcgcgcaggtggtggttccggcagccatcgccccggagatcaacgacaaaatccgcgatatcgccgtccgcgcttaccaaacgctcggctgcagcggaatggcccgcgtggacgtcttcctgacggaagataacgaggtagtgatcaacgaaatcaacacgctgcctggctttaccaacatcagcatgtatccgaagctgtggcaggccagcggtctggattacaccagcctgataagccgcctgatcgagctggcgctggagcgccacgccgccgaccgcgcgctgaaaacctcaatgaactaagcctctttcccgggtagcggcgtaccgtcttacccgggctaccacgtcgttattacgcctcttctgccggacggcggcgaataacaaatcccgccagccagaagctcacaacccacgtcgccagaccgacggcataagattgccacccctgcgcgtcaaaccccagcagccccaccacgccattcaaaataaaaattaaccccagcgcgaacgcgtagtagtgccagtcacggcggattttgtcggtcagcttcataacgactcctgcagaaaaaaagcatcatcgcatagccgcccgccgcgccaacaagattgttcgcacaatgcgaagccgctctcccttttgtgcaatgcgggcccgccgacagttttgtcaaaacaggattattcctggcagaaattaccagcaatctgatacagggaaacgcccgccgctgccagaattcctgtctatagagctgggggaaaaccagcggaacaggtgttgcggaggtttatatggctgaatttacgttttcaaagacgctgatggggagcaacaaaaagaaggtatcggtcaccagcggtaacattgcctacgcgctttttgttctgctgtgcatctgggccggcgcgcaaatgttgagcatgctggtacacgcgcctggcgtattcgaacatctcattcagattcaggataccaaccgcccgcgtattgaaattgggctcggcgtcggtaccctgttcggtttaattccgttcctgtttggtagcctgctggtcggcgcgctggggcttatcctgcgctggtaccataaccgttaacgacgcgccatacagctggcgcggcgatcgtcgacccgcttagcaaaccacgcggtggtgagattgcgggtgattttcgggctttccagttggatccctggcaacatctcgcgcggaagtgttttcccggcctttttctcggcgattttgaatattttcttatacaaatcgctctcttcaaacgccaggctatcccccttcttcagttgacgatggatatcgccatcgctcatccccaactgcccggctaaacggcgcaccgccagctcagtcgttccgggttcatcgctgtcatagcgaataagatcgccatccagcgccagcttaacgccggtggctttaaccaccgcattctggaaggcggcattacggctggcataccaaccggcattgaaatcagcaaagcggtacagcggcacgctgtagttagccgggtagttgagcagatgataggtgccgaaccacaacccgccacgtagactgaaaacctcctggcgcacggtgccgtccattttccacggataaccatcggtgtgctgctgggcaaaggcgatgcttacctgcattggcccgccggtatgcaccgggttgagagagccgaacagcttctggcccatcggcaccatgccaatgaagtcatcgaaaatcgcgctcagctgtttttccgttttgacgttatccaggcgatcgctgtaacttttaccgtttggtgaggtgattttcagcgcggtatgcaccagaaataccgggatatgcattttttccgcccggcggtcaatttcctgccaggcgattttattcaggcccggcaccgccggatcggcctgatagtttgattcctgctgcgcgaccgccagcaccgaacagacgttttcttccgtcggcgccagcttctggctgtcaaaggttttggcaatcgcctgcgcccaggcctcgcggtctttgacgctggcgggcattttttgccgcaccacggcggcaacatccaccggcttctcgacttctttcaacttaggcgcctgctggctggtacaggcgctcagcaccaacccggccagcagcgtaaaagagagtgaaacaccgcgagaaacctgcgccataaaccttccttgcatttattaattaacggttgaagagacttcctgcaaccctttgttatccagttcgcgctcaaagctgcgcaaacgtttatagatggacatcagttccaccagcgtggtccacgaacttatcagatactggaacgagccgcgtacctggccgaacacgttggtgatctgggtcatcaggccgagcgtaatcgtaccggcgacaatcgacggaaacagcaggaacaagccgaaaacgttatccacctgcaggtaaagaatacgggcgatattgaaatacatatagtggaaatagagacggaagtagttgtggcgcaccgcgttgaacagttctcgcacggtcggcggcgtggcgcgattggcgtcgtcctcgccatacaccagctctttacgataggcggcctctaccctttggtttttaaattgcaggcccggcagcttgatcccgaccaccgccagcagcccggttcccatcagcgaccacacaatagcggcgatcaccagtccatacggtaaatgaccaacgatcggcaggtccggcacatgcgccgacagcgaaaccagcaccggcaggaaggcaatcagcgtcatgaccgcattaataaagctcacacccatgtcttcaagcgtcgcggcgaagcgcatggtgtcttcctgcacacgctgagctgcaccttcaatatggcgcagatgctgccagtgttccatatagtgttcgttcatcgcggtacgccagcggaacacatagtggctgacgaagaagttattcagcacgccaatcaccaccgcaatcagcgcgatgccgagaaaaatgccaatctcgtggtagaactgactgatgctgaccttgtgcggcgtggccagcgcgctctgaatcaaatcatagaacggcgcataccaggcgttgatcgccaccccaacttccaccaaaaaccaggtgacaaaaataatcaacgaggtgccgagaatcgaccagtattgccaacgatgcgggctatagataaaccagaacagcgcaaaggcgccgacgcagaacaggtaatacgcgtaaaataccaaatagttgagcgaccagaaccgcgccgcgctgatggcgacatcttgcgatgcgccggttatccgcagcagccagtcgccgccgcccgcctgccaaaagatcaccgccagcagcgaccagataaaggcagaaataaaaaacggccccggtttggggaaaaaagctttaaacatcgtactctcctgctaacttcttatcgttctgtttttgctgtgtaccacacgtacgcccgccgcaacgcgcggcggcgaagtaaagcggacccatgatgagaccggatatcagcgacttagttcgtctgccattcggcaagaattgtttctacgggtttcacgcgtaatggattaccggggagggtgaaagtccgccacacctcgttatagtgagcgatcagcgttttagcctcggcggcggcgcgattggcggtggtatgggcatcttcggcaatggtgatggcgtagccgcggctggcgccgtttttgatggtggtatcgacgcaataatcggtcgcgcagccgcagataacaaaagcgtgagttccgttctcgcgcagcacctgttcaagatcggttttataaaacgcatcacaggccgttttggtgacgtagcgcgccccggcgggttgcgccagttcaggcagcagcgcgaatccttcgcttccttcttccaggccgcctgcttcagcgtgctgaatgaaaataacgctatcggcggcgtgaatcaggcgattgatttgcgctacgcagcgttcgcgatcgacacgcggcgtctcgaatacgccgttttgcatatccactaccatcagaacccgttgagatgccatcaccactctcttttataagatgaataagagcttaatcatacgcgtcaggcggaaaagcagatatctgaaagcggaaaaaagtcatttttacgcaccgttacgcttttctgtgaaatattgtcgttattcccactttgctcgccgcgacttcgtagtataaatacggtgtatattcccctaataaacgatggatgcctccgttgaaacgtagtttgctcatttttgctgcgctgtgcgcggcgtcgtggacctcagcccaggcggttcagccgagcgttgatccggtatttacttctgatgtggtcgaccgcttcgccgaacatatttattacggcagcggcgccaccggcatggcgatggtggttatcgacggcaaccagcgcgtattccgcagcttcggcgaaacccgtccgggtaataatcagcatccacaattggattccgttatccgcatcgcctctctgagtaagctgatgaccagtgaaatgctggtgaaactgctcgatcagggactggttaagcttgacgatccgctgagtaaatacgcgccgcctggcgcgcgggtgccaacctaccagggcgtaccgattacgctggtcaatctcgcaacccacaccagcgccctgccgcgcgagcagcccggcggcgcggcgcatcgcccggtattcgtctggccgacccgccagcagcgctggaactggctgtcgacggctacgcttaaaaccacgccgggttcgcaggcggcctattccaacctggccttcgacctgctggccgatgcgctatcgaccgccgccggtaagccctacccgcagctgtttgaagaacaaatcacccgcccgctcggcatgaaggacaccaccttcaccccatcgccggatcagtgtcaacgcttgatggtggcggagaaaggcgccagcccgtgtaataacaccctcgcggccatcggcagcggcggcgtgtattcgaccccgggcgatatgatgcgctggatgcagcagttcctctcttcggatttctatactcgcggccagcaggccgatcgcatgcagacgctgatttatcaacgtacccagctcacccgagtgatcggcatggatgttccgggtaaagccgatgcgctgggtcttggctgggtgtacatgaagccgaaaaacggccatccgggcattattcagaaaaccggcggcggcggcggatttattacctatatggcgatgaacccgcaggctaacgtcggggtcttcgtggtggtgacccgttccgcgttgacccgtttcagcgccatgagcgacggcgtcaacgacctcgtcagcgccttaagcggcgtgcagccgaatatggaaaccgccagccagtaatcgttgcgggatgttttgccactgattgttaaggatcgttttggcgaaacatcccgctgtcgtttgcggtacactaccttctttcatttcacaaaatcaggcaaaccatgacagatttaatcactcgcccacgccgcctgcgtcaatccgcctcgctgcgcgccatgtttgaagagacaacactgagtttgaacgacctggtgttgccgatctttgttgaagaagaaattgacgattacaaagccatcgaagcgatgcctggcgtcatgcgtattccggaaaaacatctggcgcgcgaaattgagcgcatcgccaacgccgggattcgttcagtgatgacctttggtatttcccaccataccgacgcgaccggtagcgatacctggaatgaaaacggtctggtggcgcgcatgacccgtatcgccaaacaggcggtgccggaaatgatcgtcatgtccgatacctgcttctgcgaatacacctcgcacggccactgcggcgtgttgtgcgagcacggcgtcgataacgatgcgactctggaaaacctcggtaagcaggcggtagtcgccgcggccgccggcgctgatttcatcgcgccatccgccgcgatggatggacaggtacaggcgatccgccgttcgctggatgccgcaggctttaccaataccgcgattatgtcttactcaaccaaattcgcctcatcgttctacggcccgttccgcgaagccgccggtaccgcgctgaagggcgatcgtaaaacttaccagatgagcccgatgaaccgtcgcgaggcaattcgcgagtcattgcttgatgaagcccagggcgcggactgcctgatggtgaaaccggccggcgcctatctggatatcctgcgtgatatccgcgagcgcagcaacctgccgctcggcgcttatcaggtcagcggcgagtacgcgatgatcaaatttgccgcgcaggctggcgctatcgacgaagagaaagtggtgctggaaagccttggcgcaattaaacgcgcgggcgcggacctgatcttcagctatttcgccctcgatctggccgagaaaaaaatcctgcgttaaaccttccctctccccggtagcgctgacgcttaccggggctaccttgtagcccggatgaggcgtgagccgctatccgggaatcagattttgcgtgctgctttccatcttccgtgacggctccttggcgaaccttctcttctcctttaacgtcttaaatcacattataaacgctggctaccaggagaagctgtggttgcttatcgacgctattacatcaaggggggaacctggttctttaccgttaatttgaaggaccgtagaagcatgcttctgacggaaagaattgaattatttcgctactccatctccgttgtaaaacaacgtcgcccttttatcattaatgcctgggtggtattgcctgaacatctccactgtatctggacacttcccaataatgatgacgatttttcttcacgctggcgcgatatcaaaggctgctttagcagaacactaaaacgacaacatatctggcagcctcgcttctgggagcatgctatacgtgatgaagaagattatcgccgtcatgtagactacatccatatcaatccactcaagcatggctgggttacgcaggttattgattggccattttcaacctttcatcgagatgtccaacgcgggctatatcctgcaaactgggctggcgaaagctttgaacttagctgcggcgaacgccgatagcccctccccggtggcgctgacgcttaccggggctaccaaccgaatgccaaatcgtagcccggataaggcgtaagccgctatccggggcctctccccggtggcgctgacgcttaccggggctcccgaccgaatgccaaaccgtagcccggataaggcgtaagccgctatccggagatcctccccggtggcgctgacgcttaccggggctaccaaccaaatgccaaaccgtagcccggataaggcgtaagccgctatccggggatcctccccggtggcgctgacgcttaccggggctaccaaacgaatgccaaaccgtagcccggataaggcgtaagccgctatccggggatcctccccggtagcgctaacgcttaccggggctaccaaccaaatgccagatcgtagcccggttgaggcgttagccgctatccgggaaacctcgcctgctgagaccgaatattcaccgaattgtaatctgaacgacatctgcgccttctactgtctgggcaggacagaggaggagtcactatgtttagtctcgacaacgttctcgatgacctgtggcctcaggcgaggcccgccccctggcagaaaaaggtgttgaaaaagcttctgcatgaagaagagttccagcaatttgccgcccgccatcgtcacctgaaaggactggatacggtcgaacaggtcctcgaacatctcaatatccgttgcgctattccggcgcagcgtccttgcaaaacacggccctcagcccgcatccatgcgggctgccccggcctgccgggaacgtctcagcgattttgaggccaccaacaccggcagtttcagtagccacgggtacagggtagaggccacgaaccgtaggccggataaggcgtagccgccatccggcgcgaaagtggctctttacccgcggttattgcccggcggcgcgttgcgccttatccgggctaccaaactgcacattactgtagccggcgtaggtcgggtaaggcgttagccgccacccgacaaaacaggtcatcaccggggccggaggcacaaccggcggcatagcgccgccggtatagggcttacttagccggaatagctttcagcagttcggtcagcagcgtccagtactggccgacgctctcgatatgaacctgctcatccggggagtgcgggccggtaatggtcgggccgatggaaaccatgtccatgtccggatacggttttttgaacagaccgcattccaggccagcgtggataatttgaatgttcggcgtcttgttgaacagacgctgataggtctcgcgcaccaggtgcataaccggagagttggcatccggctgccagcctgggtaagcgcctttggcttcggttttcgccccggccagtttgcccagcgaatccagcatgctgacgacatagtctttaccgctgtcgatcagcgagcgaatcaggcagtggatctgtacgttgtcgtcggtcatggtgacgacgccgacgttcagcgaagtttcaaccacgcctttggcgacgtcggagttgcggatcacgccgttcggcgtcgcgttcagcaggcgcacgaaaccgtcgcgggaagcctgagtcagcgccgctttatcgttcgcgaccgcttccagcaggacgaccagattcttctctttggccgccagttcgtttttcaggatatcctggtaagtattcaccagcgctttcagcgcatccgctttgtccgcggcgacggcgacggtcgcgaaggcttcacgcgggatagcgttacgcagcgtaccgccgttgaaatcgaccagacgcagatccagttcatcggcatggcccgccaggaagcgcgccagcagcttgttagcgttgcccaggccgacgtggatttcaccgccggagtggccgccttttaagcctttcagggtcagtttaaagctctggaaaccggctggaatcgcttcgcgagtcagcgccaggttagaggtgaaatcgataccgccggcgcaacccatgtagatttcgccttcttcttccgaatcggtattgatcaggatatccgcctgcagccagttggcctgtagaccgaacgcgccatccataccggcttcttcggtcatggtcagcagcacttccagcgggccgtgggcaacgctatcgtcggccagcaccgccagcgcggaggccataccaatgccgttatccgcgcccagggtggtgccgcgcgctttgacccattcgccgtcgatgtacggctggatcgggtctttagtgaagtcgtggacggtatcgttatttttctgcggcaccatatcgaggtgcgcctgcagaactaccggcttgcggttttccataccggcggtcgcgcctttacgaatcagaatgttgccaacctggtcgcgttccgcgtgtaagcctttctcttttgcccaacccatgatgtgctcggcgagctgttcttcgtgataggacgggtgtgggatggagcaaattttggcaaaaatatcccaaagcggttgcggggataattgagacaattcagacacgatgagtctccttacagtcacctgcaaaagtcgtttacaggtcgagggttagcaataagattcactacaagctcgggcttgcgcgatgtggttgagaataccactttccgcgcgctctgctagtgtaaagcacgcaaaaagcgttgccggaggcgcttaatactggtttttagcgcgtcaggtctctataatctcgcgcaaccattttccccctcgaacaatatttaagccgttatacacaggctgggacaattcacatgagcgaaaaatacgtcgtcacctgggacatgttgcagattcacgcccgcaaactggcaagccgtctgctgccggttgaacaatggaaaggcatcattgccgttagccgtggcggtctggtaccgggagctttactggcgcgtgaactgggtattcgtcatgttgataccgtatgtatctctagctacgatcacgacaaccagcgcgaactgaaagtactgaagcgcgctgaaggcgatggcgaaggtttcatcgttattgatgacctggtcgataccggcggcaccgccgtcgctatccgcgaaatgtatcctaaagcgcactttgtcaccattttcgctaagccggcgggccgtccgctggttgatgattatgtggttgatatcccgcaggatacctggattgaacagccgtgggatatgggcgtcgtcttcgtcccgccaatcgctggccgttaattcccgccaatcgtgaataattaccacgcccggttatgccgggcgtggttttttttaccctgacgcgggttacaatagcgaaagcagcaacatgatggaggcggcacatgtcacaggctaaccttagcgaaacgttgtttaaaccccgattcaaatatccggaaacctcaacgctggtccgtcggttttcctccggacagcatcagggcatgcagaccgcgctgagcggtaatcacgtcgaccactggtatcgcttaatcaatcgcctgatgtggatctggcgcggcgtctcgccgcaggagatatgggatgtccaggcgcgcatcgtgatgagcgatgccgagcgctccgacccggagctctacgatacggtgattggctatcgcggcggcaactgggtgtatgagtggactaaacaagcgatgatgtggcagcaaaaagcgactcaggaagccgatcctttgcagagcggtcgccactggctgcacgcctccaacctctatagcatcgccgcctacccgcatatcaagggcgatgggctggccgatcaggcgcagacgctggccaatcgcgcctatgaagaggcggcgcaacgtctgccgggcgagctgcgggaactggaattcgctatccccggcggcgccccggtgacgggcttcctgcatatgccgaaaggcgaaggcccgtttccgacggtgctgatgtgcggcggtctggattcgctgcaaaccgattattacagcctgtatgagaagtattttgccccgctgggtatcgccatgctgacgctcgacatgccgtccatcggtttctcaaccaagtggacgttgagccaggacaccagcatgctacatcagtacgtgctacagcatctgcagaatgtcccctgggttgaccatacccgtgtggcggcatttggtttccgcttcggcgccaatattgcggttcgtctggggtatctggagtcgcagcggctgaaggcggtagcctgtctggggccggtggtgcataacctgctggtggatccgcagctgatggcgcgggtgccggagatgttcctcgatgtgctggcatcgcgtcttggcatgcacgatgcttccgacgaagcgctgcgcgtcgaacttaaccgttattcattaaaaactcagggcttgctgggccgccgttgccctacgccgatgctctccggctactggaaagatgatccctttagccccgaagaggagtcgcggttaatcacctcctcctcggcggatggcaagctgctggagataccgtttaagccggtttaccgtaatttcgatcacgcattgcgtcagattgcccgctggatcaaccatagatttggttaatatattgctaaattttattggtttggtaaaacagttgcatcactaaaggagatcgcaatgacgttaccgagtggacacctgaaaagtaagctgattaaaaaattcacggcgctaggcccctatatccgtgaagggcagtgtgaagagaaccgcttttttttcgactgcctggcagtttgcgtcaacgttaaaccagcgccggagaagcgggaattctggggctggtggatggaaatggaagcacaggaatctcgtttcacttatagctaccagttcggcctgtttgataaagagggtgactggcaagcggtcgacatcgacgatcccgaggttcgtgaaagactcgaaaaaacgctgcgtgagttccacgagcgcgctgcggcgctgctggcaacgttcaatctgaaactcgaaccggctgacgatttcagcgaaccggttcgcctgcgcgcgtaaacccggcttttggcatccgctttctgccgtgggaagcggatgaccgccaacgatgattcttgtcatcaggtcacggcgcttcagccgttattcctgcgcttcgcgataagttgataacacccggaatggctggccgaccactacctgaccggcggccagatctttcgtcaccacggtccccgcgccaattttgacattatcacccaacgtcaccggaccgatgaccaccacgtgggcgccgaattcgacgttattgccaatcaccgggcttgccccttcgcggccttcgctatccgtcaggctgccgatggtggctccctgacgcaggatacagttttcaccgatgacggtgccgcggttgaggacgatgcagtgtggatggtacagcctcaacccgtagccgatccgcgtttgccacggtagttcgacgcaaaacagacactcgttaatcagtttattgagaataacgaatggcatgcctagcagcttgtaaaacgggttgcggctgcgatacatcgtcgcgaggcgatagagcagaatcgcgattttcgccttcatactgccggtatgtttgatctcgcggcggacctgactaatggcattaggcatgaattctccgtttacttaatggaaaaggtggtcagttgataccagccgtcggcggttttaccctggttggccagcagaagccgcggcttaccctgggcatcggtgatggcggtctgcagcgcgtaatcgccggcgggcagcgaggcgggtagcgtcagagtgacagtgctttgcatatcccccggcagccagcggcgcacgtcatcctgggtttttacctgggtaaccgtggcgccggcggcgttgaccacgcgccattgtaccgggtagaacagataggctggggcgacgccatcattacgccaggtaacactgaccgctaacggcttaccagccttaaccggggtctcgaaggcgagcttattgacccggaaacggtagccgattcgcagtaaggctttatcgacaatatcgcggtattccggcggaatcgggcgagatttcagattcaggctgctggcgtgttgctgtagcgcccagtcgaaggtggcctgcacctcttcacgcgtgtagtgctgtacgctctgccattcgctcatatagccgcagatctcaaggctgacgggcgcccgtttccagctatcgacaaaccccggcgccgcggcctgagcggcggccagacgctgcggataatcatcgcgcatatggctccattcgctggagaagttatgccagtcgccccagcagtccgcccgccagcccgcgccgcggcggctggcccaggccagcgaatcgccgccgctaatcagcatgactttcggcgttttcgggaagctatcgaaatgcatatcaacatagcgattgagctgctccggcgtgtacttctccattaacggcggaatctcgctaaagttggagttgtgccattcgccccaggatccgaccatgccgatatcgataaaggccagttccgggttgccgtcatagcgctgaccgagggcattcagcagtttctgcgcataggcgataaaagttggatcgctgagatccggcacgaaggttttaccgtcggcgacccactggcccttgatccctttggcgatcagccagtcgggaattttcgatcccgtttgcggctcgtcgagcgccattacccgcaggccgacgttcatggctggctgatggctggcggcgacgctaaaagcattatcgatcggcgcgaaattgtagaccccttcctgtggctccagctcgctccagtagaagcgatcgtattcaaaaccggtatcgggatactcggcgcgggtcggtttttcaccatagccatcatgaaagctggcgacgccgatgcccggattggtgagcaggccgtcgaaaggaggcggggtgatgaccgtggtttgcgcgccaacggatgctgacgccagcgcgctggccagtagcagggcgcgaaacagaggagcgctatgcagagataatatcgccatactcaattcactttgtcatgtggtcatgaagattaacaaaccacgtccagataccgacgtggaaatttttaaatacatcaatgcctaacgctgatttcaacatatagagcgccagtaggatcgacagcagggcgaacaccacgccaagcgtaatcagcagcgtcgcgaagacgcgtccgaacagagtgctttcgcgcgaaactttgcgcagatcccgaccaaaaagaaataccacgaaatagcggcgatgcaggaacggaaagctgtggcgaaaatcgatgcgatggcgtgacgccaggttggcgcgcaccaacgcctgctcgattccccgtttctgctccgcggttaatgaggtttcaacctcctggtcaagcgcggcatagaagcgctcgaccaccagttctgctgtagatttcggcacgagtaacctgcttacgttaagcgctgatagacttgcgcggtttgcgcggcgatttccggccagcggtacttcggcataaactggctgtaatccgctttttctcctgcgacccattgttgcagtttctgcgtcagagccggaacgttgccgacgggaaagtagtccgctggcggcaggccaatttcaaggttggccggaatgtcgctgaccaccaccggcagtgaccacgacatggcctccagcagcgcgatcggcaatccttcatgataagagggcagcacgaatagcccggcctgcgagaacagcgtatgcagcggcgcgccgctgataaagccggtgaggatgacgtttggcgtggcggtcgcctgttgcttcaggcgctcgctatattcatcggcgtgatcggcatcgccaatgagcaccagcggtaccgaacacccggcggcggcataggcggcaacgagatcgtgcagccctttctcttcgacaaaacgggccacggcaacgatatactggcccggttttagaccgtatttatcgaggatctccgcctgccgatccgcaggaggcaggtcggcctggcgcacgccgttgtagataacatgggcgttatggcggccatgcttgtgcttaatcagattattgatgacctcggaaatgacgatcacttcattggcgtatttcaccgcccatttttcgccaaggcgcagcatctctttggccatccggccccatttctgccgatcgtaatccgggccatgatgggtaaagacgacgcgttttcccaacagacgcagcaacggcaccaccaggccggggccgacggcgtgaacgtgaaccacgttggagccgtcgaataaggtactgaacgccgccagcgtcgagtgaataatagcctcgaatttacggcttttcggcgcccacagactcttgagtttaacgccctgatattcgctgcgtcggtagttcacatagggcgagcgggcgatcacgcagacttccgcgctgccctggcgatagatttccgggtataaattctggcagtgagtttcgacgccgccctgcacatcggggatcccacgagtgcctaataccgtgacgttgatggtcattttttctccccgacaagttgttcataaagcgcctgcagcacctgcatgtggcgggcgagatcgtatttttcttccagccgctggcgggcgttaattcccatattgcgggccagctcagggtctgcagccagtttgtccatcagttgcgccagcgcgtcgctattgccgggttcaaccagatagccgtcgacgccgtcacggatctgttccgggataccgccaatattgccgccgatcaccgggcggccaaaagccatggcttcgagcaccgacatggagcagttttcataatattcagaggggacgactaccgcgcgggccccgcgaataaggttattcagctcctcgccgtgtttcatatagccgaggaactgcgggccgttgaagcgcgcgcgtaggtctgcgcccaatgggccatcgccgacaatcttaagcggcatcgcctcccgcattttttgctgcgcctgcgccagcgacggtacgcctttttcccggctcaggcggccaatatagagaaaatagtcgcccgcagtttcgccgggcacggtgctattggcatcaataccgttgacgatcacttcaatgcgggcgtcgggcagcttacgcagcagagtctggcgcataaattcgcttggggcgatgatacagtcgagcatggcgtaatttttggcgaacttctgccagtaggcctccaacgatagcagcagacttttgaaagtatcgccctgctggcagcggtgacgaaaagcgttgatcactgacccggtcagacactcttcgcagacatgaccatcgcgcagcatggtgtacgaaggacagacgattttgtaatcgtgggcggtgagtaccgttttgcagccaaagcgtttcgccacgccgataacggcaggcgtaagctgatgatagatattatgaaaatgaacaatatccggccgctcgcgcaacaaaagcgtgttgagcttcgcgcaggcctcggcattataaataaagtccaccccggctttgattttgctcatcaggccgtgactgtcgtggtaatcgacgttatggacgaaaaattcctcccacggcgatggtttattttccgcgtgctgcatgctgaagtcgaccacctggtagccggcttgcagcatcgcgtcgcgctcctgaaaataaacggtttccgcgccgcctttgataaagaagaatttgttaacgaagagaattttcattttcagtatcaatatgctgtggattcgagacggtcaccgccgggcgtttcatcggatcgcgcactgaattaatcaccccgcgcagcagcccagctgaaaatagcgataagttaatcgcgctctgcacgccatcgcgcagcgatttatttttaatggccttcagagcgataaacgccagcagcggcagcagggcaatggcgataaccttgccattgaaggtcagtagacaaatcagtaaaaccagcagatagagggtgaagagcagctcattacgtacaatccgcagcgccgccgggaaatgggctttaccccagcagtttcggagcaactcgcccggcgcccacagaaagccgttcttccaacggtaggccagcattttaaaggtcggcatggtgtaagaggcgtggctaaagtagggcgccgccaggcgatgcagtttgtaacctgccgcttgtaaacgaatgcccagttccgcttcttcgtagccgtgcagattgaggttggtcagatagccgattttctcgatcgcttcacggcgatataggccgccgccgcccagatgatcggtgtcgccctgcggatagatcagatgcaggcgctgcttgcgcgatttgaactcatagttagaggcatcatccatctcgacgctgccggcgactcccgcgtactccggatgcgtttccaggaattcgaccgcggtatccagaaagcccggctccagctccatatcgccatccagcagcagcagataatcgccttcgctatacagccagcccagctggtggccgataccgcagcagcggtcggcggcgttatccagacacaccaccatcgcgcctttcgcgatagccagttcgcgggtgttatccgttgataagctgtcggcgacgatgatttgatgcgggtacggttgcagctgttttcgcacgctatcgatcgttttctcgatgccctgcgcttcgttcagggtcttgatgctgacggtaatggatggcgttttattcatagtgggtaccggagttaagacggacagcgcggtggatgacaatcagcgccccaagggataaccataataaaaactgtagcatgggaatgatcatcaggatctggctgtagggcaggctgagcagacagccgatgacaaaaacatagaacgccggcgccgtgctaaggagttgcagatcctcaagcttgagatcgtggcgcgaaaaggtctctttcggccgcatggcgaccaggatggaggcgatggtgccaatgaacagaatgatgccgataatccccacttcccacagcagcatgcttaaggcggtggaatcgaggatcaggtgataccagacgccgatatagcccggcgagacggtactgccgctgttggtggcgttaaggccgtaaccaaacagcatgccgccaggaccaaatagttcgttatgctgcagccagaagaagagggtggtaaaacgccccagttcgccgctgggcataatgtagttagtatcaaaaatatagcccagcgaatcgatgaataccgatagcgcgcttttggtcgggtcgccgccgaaggccgaggaatagttggaggccaacacggtaatggcgacaaaaattaatagcgccatgccggcggcgatgatcagcagcgatcgcaggctaactttactcacgccgcttacgtagccgggcaggatccacagcagggccagcaggaacggcgatagaagaatgacgaattttacttcccccaccacgcagaggaagaaacccagcgcgatgtggatcaccagcgatttaaatgagcagatgccgtgcttaaactctgacactttcataagcatgatcagcagacagaacatccccatagccgcggtgttgccgccgcccatcgggtcgccgccgaaagtgccgaccaccgagtcccatttctcatcttcgccgcgaaatgccacccgtttaggcaccacgaaaatcacctgatagatagcgaccgggatctgcacatagtagatccagtagaaaagacgcgtcagacggtacagctgtgattcactaaacatgcccaacagcatgcagaacatcagcagcgagagcgccagctcgtttttaaagccgacgatggcggtgacgacccctgactgtagtaccgttgagaccagcccgagtacgataaaggtcagatacagcgccagtattagcttttcccgcccggtgagcgccagcggctgcgggcggctctgcatcaggagcagcaccgccatcaccagcaccagaaaaaatggcagccacagcacggccgcgataccggtgaaatactggaccgtaccgcagaacaccagcgtcatcagggcataggcttcgagatagcggccggtgtttagctgcatattttctgctcctgcagcgaaagcgttttcgcccgctgattcattttgagcaaaatgaacaagtaacgcgcgaaggtcaggaacgagaaggccagcagggcgatttcataactgacgccaaagtacggcaaggcgatgaaggcgatgacgataatcagcaactgctcaatctgaatacgcaaaaagtagcgccgggagccgaagatcagttcgatcaccgtcagcgggctgaccgccagcgcggcgaacagataaggcagcatgtagcgcgaggtggggatcgaattcagccactcctcgctaaagcccaggcgcatcaccagcggatagaaaatccagataccaaggatgcacaccgcggcggcgcccagcagcagcaggcgaacttttttatattccggatagttaaaggtgcggttacgaaaatccatcgaccatttagaaaagatggagttgcgcacggcgttaccgataatcatcaccggcgacaggcagaaacggctgaccaccgaaaagtagccggcgaccagcggcgagaaccagatgttaatcagcatcgtcggcaggttattactggccatcgccagtacctcggcgctgccgacgcggctgatatgctgccagtgctcgcgtaaaaaacgtacattcgtcgcaatcgaaaagtggcgcaacgttaagcttttgaagttaaacaggcgaatcaggcagacgaccagcagcagcaggatgccgaccatccacgccagataaaacagcgttgggttgggcatcaccagcagcgcaatagcgaccaccagcgacaccgcaatgcgctggaaggtcaggaaaggatagttaccgccgcgcagggaaaggttttccgccaccagcaccagcgcatagccaaaggtcagcaaatagagaaacgcaatgttaagttcgaagataagcccggtgatgaccgcccaagggagggccatcagcagactctgcagtaggcagaacactacgttttgcccaagctcgtgatcctcctgacgggggattagcaactgcgaggcaaaggtacagacctgcgcgccgatcagtacattgctgtagatcatcgcgtaatggccgacctccgccatcccatagcgatgagagataagccagaccgaaaaggcgccgatcagctgcgaaagcaccgatgaactggcgatggatgaaatactcttaatcagattcataggcgctatttcggagcaatgagttcgtgcatctggcgctcaagcaggcgtttaccttcctgcgtttccaggtgttcttcgcgcacctggttaagcacgctcgccacccggctactacccgcgctctgcagacgttgttccgctttgcggatccgcggagcctgctcgccggccttcaccaccagcagagtcatatcgctttgtgccgccaacagcaggctatcctgagcctggttcagcgccggggcgtcgatgattagcgtatcgtaagtttgatgcaacgttgccagcagcgccggcaggcgttcagaggtgagcaacagcagcgaagagtcgttgagcttgccgcggggtataaagtccagttgatcatccagtttgacgacggactgctccggcatgcaatcgccgttcagcaattgactgaagccctgtttatgttgcggaaatttcgccgataacccctgagtcgccaggtagtcgaggtcaatcagcagcgttttacgcgatttgctggctgagcaggccagcagttcggcaatatacgaactgccggagcgggattgtaccgaagtcaccaggatggtggcgggtttatcgcgcttattgagcaacgccagccgcaggctgtggatcatatcggcgtagagcacgttatggaaaatctgctgcgcgttttccagatgcgccagtagcggaaattcgccgctggcctcgagggaggttttcgctttgagctcgctgaggctattcaccgttttatccagcgcggtactgactatcaggtacatgatatacagcgccagcgccatcagggtaatcatcacgatcaacaggccgcgctggggtttagatggacgatccggcggtacggcggcgtcgtaaatgacttcatccggtaccgagaaggtctctgacaatttctgctcgttagcgcgctggtacagtgatttataaagctcttcggttttattcagcgcggtggtcatggtgttgtactggtcgcgcttggcgccgagcgcctggaaatcggccttctgatcgttgagcattttttggtagtgctgctcatcgtcgagggcgatttgatattgctggcgcaggccgttaaacagctcgcccaatacctggccgagctgggcattcaccgcctgcagctgcgcctgggcctgcagatatttcggatgctgcgggccgtagtgtttggccgcttcggaaagattgcgccgggtctggatgagcgcaatgcgtaaatcctgcacctgcggatggccggagatttccggcagcgagataatctgctctaccggtttaccctgctggcggcggaccttgtcccataccgtctgcgctttcaggcggcgctgggtggcgtcggccagatggttaatcacaatccccagccgctcggtctcataaccatccatgctgcggaaggttagtaatccgttctgcttgaggaagttatcgatgtccgccttctgctgatccattttggttttcaggtcgtccatcattttttcgttccagccctgcgcctgaagcaaggtgttttgcttctgctgcaggctgtaatcgatgaaggcctgggcgacgccgttggcgatatcggcggctttctgcggtgatttcgcttccatcgatacggcaaccagttgggtggtgcgcacgccggaaatggtcaggcttttttgtagcgcctgaatagcattattaatacgcgcggtttcgtcgagattatcgccgccgttaaattcgctatcctgctccagctttaatttacgcaccgcggcatcgagcactactcgtgaccccattaacgcgtacttggtctcgtagtaatcgctgcgcgtggaatcgtagttttccagtcgcggcagaggagagacgtcctgcgactgcgctttgaacagtacggtagcggtcgccgtgtagctggaagacataaagcgcgtcagaataaatgacgccacggcggcgacaatcaccaccgccaggcaccagataagcttgtgcttaattttgttgaaataaggcgtgaagtcgataaagccttctttctttttcgcgttttcgaccagtgaaattgccatatcagaagaaactcatgccaataatgatggtatctcctgcctgcacggaggagtcggcggcgacattttccagcagccttccgccgcgggcctgtcgaatttgaatatcatgacgatcggcgcggtcggtgaaaccgccggccagggcgatggctttttccgccgttaaacccggctcccaggcataaccatccggttttttcacttcgccgagcagataaactttgcggtattcggcgatgctcaccgtgaccatcggcgcctgtaggtagttaccgcgcagtttatcggcgatttcattactcacctgttcaggcgttttgccttttaacagcagcgatccgatataggggtaatcaatgctgccgctattatcgatttttacccgcatcgtcagatcctgctccccggagaccgcaatattgacttcatcgccctggtccaaaaggtagacggcgtccggcggcgttttaatggtctgcggcggcgttgaacagcccgccagcagtagcgccagcagcggaagcatcaccagtgtcctgtttaaaaaggtcatagttgtacctgcgtcataaaaataatggccgaatcgtcgtagcccagggtgcggtcaaccgcatgcgagtagtccgggccaatataaaaagtgtccgtatctttatttgagtgcatggtgttccattgcagcttcagcttaaagttaaccgatggtcggaaatcatagttaaaggtcagcgacagcagattagacttatctttgcgcttattactctgatgcttatagtcttcagtgatatatgaataatcgaccagagttgagaaacgatccaccagccagtgatgttcatagccgacgccgaaattcgacaccaggatatagccgccggagtcggtggggtccttgatgcgctgggagctgtgtaggttaactttcatttgttccagcggtttccagtcggcgttgatatcccagttcaggccgttaaaaccctgtgagtccgggttatggataaagtctttgtagagccaggcgacgttaccgttaatctccgttttacccgacaggcgattcttcatgccgaccagtagataatactcattgctgtcttttaacggattcagctcgtagcggcgctggttggtgataaagctatagcggtagcgcagcgttttggctttctggtcaaatacttcggccaccaggctgttttcatgccactcctgatcgtgcatgtaatagttaaagtcatcgctggcgtctttgatgctgtcgaggtcgcgaaagcgcaattgtttatgcagtagcgcgacttcaactttaccgcgcccttccggcgcgccgtagctgtaacgcagctcgctgttaaagaagcgggtgccgatcggcttgttgatgccaaactctttaaactgctcaggcaaaaagccttcggtggtgtcgcggccgcgctcttcatgacccagcgtctcatcgagatccagcgacagcccgtgcatgctgccaaatcgccacttgccgttaaacataaaaaaatggttgttgcgattatctgcgctatcgttgccatagttgcggtaatcgccggaatacatcaacaggtagcggtcttcataacgttcgccgatagctttgacgacaggcttaatattctggtagctggagccgattttattttggtcgtaacgctgccaggtcacgttgtcatcgtaaccgatgtcataacccaactggctctcgaaatcgatgccggcaaccccggtatgcggttttgcctgcaggtctgcgtgtgcataaggcacagacagcaaaccggccagaacggcgaacctagaacgcatttttgccaacaaagccccggaagaaagtcaaaaagacgattttgagatcgaggaacagcgaccacgactggatgtaggccaggtcgtactgaattcgcttctccattttgtccagtgtgtcggtctcaccgcggaagccgttaatctgcgccagtccggtgatacctggtttaaccttatggcgaatcatgtagttctccaccagcacgcgatactgctcgttatgcgccaccgcgtgcgggcggggaccgacgatcgacatccgcccctgtagcacgttgaaaaactgcggcagttcatccagtgaggttttacgcagaaacgcgccgaatttggtgatgcgtggatcgttgcgagtcgcctgagtgaccacggcgctattttccatgacccgcatggttctgaatttccagacttctatttgtttaccgttgaggccataacgattctgtttaaataaaatcggtcccggagaggtgagtttgataccaatcgccacaaacagcatcgccggcaggctaattaaggtaaagaaagaaccgagaatgatatcttcaatacgcttgatgattgccccttcgccatcaaaaggcgaagtgaagatactgatagtttgcagattgccgaacatgcgcagctgggaaatatgtgagctgtaagagaacaggtccggtaccaggaatacatcgacggttgtgtcagagaattcattgagaaattgcttaatgcgctgctgtgcaaccatgggaagcgcgatataaatttcatcaacgtcgcctgtcttcgccagagccagcagatcgcgcgagttgccttttctttcgatactcatcagccggctatctcgctggttgttgcggtcttcaaaatagctgatgatgataccgcgttgtgagtactctttttgtaaagcctgctcgatggccaggcccgcgggcgtaataccgagaatcgcgacccgtaacaccgagttaaacagataatgggcagtgattgcccgcaccacgaagacaatgagaaatataaatattgagcatttcgccagactggcggccagcggaataaaattaacgactgattgcgtattaattaaccactcggcgatgacgaaaaataagaatgaaacaatactgctaaggcatacgcttaaaataagcgctgctgattttgtgaaatagtgccctttaaattgccctgaatacaaatgaaaatactcattaattcttataaatactaatgaatagataattccaacgagcgcggaagcggttgtgggttcagtataaaaatattttaaatagataaaaatcaaaacgttgacggtgagaaagtccagtagttttatcaacttgctataacgggaatgataaatttttatattgttatctgccattttttgctcgtttaaaatgagttatttaaacatcgttatgctatttttttaaactaactggaaagcctgataatcattcacatttgcaataaatggttatcaatcatcattgtagactatgagttgagtagtgtcgaccaatctcagtttaaaaataaaactgctttttaatgttctttatgagacttatttaagcggtatagagggggattaataccgaagtattatttgttgatgagcgtaaacgcagagaggaatgcaagggacagggttaattgcaagtgaaacaatcggcggctggagagtgagaattcttagcccccggccaactcaagatgctgagtcgccggggctctgaaggggacccgactttacttgtacagttccgcgctcatcgtcaccttattccccatatgggcgctggtgattttataatcagtcgcattcagctctttcgcttttttggcaatcaccgcttcagcggagtcaagcgtattaccggttgcagtcacgctatgcgcggaagcggtaaaggcaaaaagtgaaagtgcagctgcggaaaaaatagtcgatacggttttcatgttcataatcctgttaagttgtttcgttaacgttgcccgttgcaacgtgatggcgtaaaggataggtcccgcccgttgtctgaaaaagagggcaacgggcaatagacttttcttcttttgttcataaaaggaatggcttggccattcctggcaacaatcaggcgctaaagttatttttcaacgcctgcaggccgtcgcgataaataccgctaaacagcgcttcggcatccgcgtcgctgacgttaaccggcgtgaagctgccggaccactcaacgcgggtgatattgctatcggcagttgccactaccgcgatagtggagaggtaatccacgaccgggaacggcgcctggatgatcgagtagctatagctgcgctggcggttatcaaacgcttccagacgttcaatgaccgtgccgccatcggatgtggtcagcgtacgcacgcgtcccccttcgctcaccacgcttttcgggatgaacggcagccagtcgggcagcgagtcaaagccgcccatcagttgccaaacctggtcgacagaagccgggatttcgatagatacagtggtagtagccattttatttctctctttatttcaggtaattagaattacattgccagggtgtcgacgacgccgccatcgacgcgcagcgccgcgccagtggtggccgacgagagcggcgaggcgagatataccgccaggttcgccacttcgtcgacgtccgccgcccgctggataatcgagcttgggcgtgcggtcttcacaaattcatcagcctgttcacgcgggctgcggccagactgcgcggcggcctccgccagcatctcctgcaaaccttcggtgaaggtggggccgggtagaatggcgttaacggtgacgccggtaccggcgagccgtttcgccagtccgtgggagaccgcgaggttggcgcttttggtcacgccgtagttgatcatgtcggcaggaatcgcgacgccggattccgaggagacgaaaataatgcgtccccagccgttatcgatcatcccctgcgcgtagtggcgcgacaggcgcacgccggaaagcacgttgacgttataaaagtgcagccactcgctatccggcacgctaaagaaatctttatcgttaaagatgccgaggttgttaaccaccacatcagcatgcgcctcggcggcgagcagcgcgctgacgccttcttcagtgctaaggtcggcgacgacgccgcgcagttgcgcatcggggtgttcggcattaatcgccgccatggcggtatcaacaccgcgccgttgacggccgacgatgaccacggtcgcgcccgcctgagcaaggcctttagcgatgcccagtccgatgccggaagtggagccgctcaccacggcgactttatgggttagatccagtttcatgttgtctctcttgttttaagaggggccctgcggccccgctaaaattaacgaatcggcagcggcgcgttatcagccaccagattctgactgcgcatctcatcccagaaagcggctgggatggtcgctttcagcgcggccagatcttccgccatacggcccggacggctggagcctgggattacggcggccaccgccggatgagccagggcaaactgcagcgcagcggctttcacatccacctgatgacgggcggcaatggccttgatctgcgccacctgctggtggatcgccgcagaggctttctggtattcgaagtgttcaccgccggcgagaacgcccgagctgtaagggccgccgacgacaatatcgacattctgttccagcgcttccggcatcaggcgctgcagggcgcgtttgtggtccagcagcgagtagcggccagccagcaggaacgcatcaggcttcggctcgtcgagcgctaaggtcaattcgcaaggttcgacgcggttcacgcccagcccccatgcctttattacgccttcttcacgcaggcgggtcagcgcgcggaaggcgccggtacgggcgatgttgaactgctccagccagctgtcgccgtagaaatcctgcgccggatcgtggatccatacgatgtcgagatggtcggttttcagccgttttaaactgtcttcaatagatcgcagggtggcgtcggccgagtagtcgttgaggattttgttcttcaggccgtattcgaaaagaccgcctttctcaccaaaatcacgcgtcgccgggtcttccatttcatcaagcatgatgcggccgactttgctgctcagaacgaactggtcgcgagggtattgcgagagcgcttcgcccatccggatttcagaaagaccggacccgtacagcggtgcggtatcgaagtaacgaacgcccagatcccaggcggcggcgacggtggcgtgcgcctcgtcttccgggatgttacggaacatgttacccagcggcgcgccgcctaaaccaattttgcctggcagaatatgtttgatgctcatctaagatgtcctcgatattgggttcccgtctgggaagggttctgtgcgggcgatttgtgctgtcgccctgtgacggagatcacaataccttgcggtgttatgacttgataggacataattcgtctgacttaagtcctttgaggtctcacatgattgatttacgccagttgaagtactttgtggtggtagcggaagaggagcatgttggccgtgccgccgaacgcttacatatttcacagtcgccgctcagccgccagatagcccagctggaggagcgcctagggctgatgctgtttgaacgtaaccagcagcgtattcgcctgacggcggacgggcagacgtttctggccgaaacgcgctcgttgctgacccacgccaaccgtctcgaatcattaggtaaacggctggggcgcggcgaagatggcgggttgtgtatcggttatatcgaaaacgccatgcactcgggcgtgctttctaccgcgctgcgcaccctgcgaacgtcgcgcccggacgtgcatattgcgctgtatagccagccgcccgccacgcagattgagggcctgcgccagcgcagcctggacttctcgctggtggacatgccgccttcggcgggcgaacaggatctggagtatacccaggtacttgatgaccggatgctgctggctttgccgcagaatcatccgctggccgcggcggaaaacttgcagccagcgcagctggccgatcagcagtggatcgcggttatccataacgacgatgcccattcgcgcgatgatttcgtcgccgcctgcgtgcgtgcgggctttaatccggatattcgtctggaagccggagagccattaacggccctggggctggtggcggcgggactgggcgtggcgctgatccagcacagcctgcggcataacgcccctgagggggtcgtgctgcgggaaattccgtggatgagctattcgacccagctgtgggcggtatggcacaaagccaaccagcgcccgctggtgatgcactttcgcgaggtgctacgcggcgagaataattaggaatattcctggaatggggcgcggcggcaagaaaatccgccgcgatccctgcctgcgcaggaaaatcatgttaccgtcaaatattgaccctaaaattataagaccttcatgaaatttctattatctatcagtttattaagcttctttctttctccggctttcgccggcacagcggtaaaattgtcctgctctttacgcaaaaatgtgaccatctcgcgtttccattaccagctatcgaccatgaagtggggcgaccatttccaggtggcttccggcatgcgtcaggcgcagaccaaaaatcatattccctatcgggtaaccagctttcgcaacggcgacgatctggtctttttcccggacagtcaggagtactttttcttctactcgggaatggcgacgccggaccgttgcgtggtggaggaacactacgagtatccggtcacgcagctgccgtattataaaaagcccgctgcctgaatcaggattgctgcgacagcagtttgccggccatcgcctgttggataatcgggatgggggtaagtaagtgctcgcgcatgagcgcgctggctcgctcggcatctcgcgccagaatggcttccagcagcgtctggtgctggacatgtttatcttccagcatttctaccgacagcaccgtggtgcgcagccagatgaagcggtagcgcgccgccagatcgaacagccgttcgcgcatctgcagtaaatactgcgaaccacagccggcgacaatggcggtatgaaacgcctgatggcgctgatcccattcatcgagtaagcgctcacttgcttcgctggattccagcttattaagcagatgcgcgcgggccagcagctcggcttcccactcatcgccgccgcgctcaatggcgaggcgcaccagcatggcttccatattggcgcgggcatcgaagatatcgaggagttccgcctcggacatcgaggcgacgcgatagcctttttgattgaccaccgtcaccagccgctcggccaccagctgcgagagcgcttcccgcagcggcccgacgccaagctcatagcgcgacgtcagcaggctcatacgcagtttttcatcaggctgataaacgccgcggatgatgtcgttcttcaaccagcggtatccatcaatggccgtcgcttggggaatggcggtcatagtcttgctcctgaatacatttcccggcctgcgccgggaacagggttaacgcgtattttgtagcggcagtttttgccacaatagcagctttttccagcgcgacataatcggcaccgtacagatgatagcgatcgccagcgcgccggtggaaatgacctccaactgctgtgccggacggaacagcatcaccaccagtacgaaggtgataaaggcgataaccagccaggtgagccacggatagagccacatcttaaggcgaatttcaccgcctttcgccagcaggattttgcgcatccgcaactgagatacggcaatgaccagatagaccagcagggcgatggcgccggagctatcgatgaggaatttaaagaccttagccggggcatagtaattcaccaccacggttaagaaggccgcgccggtggagagcagcaccgccacatacggcgttttactgcggttggttttgcccattatggctggcgcatcgccgcggcggctcagggaatagagcattcgcgaagcggtatacagcgccgagttcaggcaactggtcaccgacagcaggatcacgccgtccataatcagtttggcgtaggggatatgcagtaactccagtaccgaacggtatgaaccgacgttcttcagccccggcatgttccacggaatcaacgagacgaccacgaaaatggagcacagatagaagatagagatgcgccagattacggaatttgtggcgcgaacgatatgtttatccggggtatccgattcggcggcggcaatggtgacgatctccgcgcccataaatgagaacatggtaataagcatcgcgctgagcaccgcgccgaagccgttaggcataaagccgccgtgatcccacaggcgcgaaatcccgctcacttcggcatagggatagaagccggtgatggccaccgcgcccagcacgataaaggccagaatggcgataaccttacagatagccagccagaactcgaattcgccgtagttcttgacgctcagcagattactgccggtgagggcgagggtgatgaccagcgagaatagccataccggtacgccggggatccacgagttgagaatgatggcggcgatattggcttccaggggaatcaccaggacccagaaccaccagtatagccagccgatggtataacccgcccagcggccgatcgctttgtcggcgtaggtcgaaaaggagcccgtatccggggtggcgacggccatttcggccagcatacgcataatcatcaccaccaataacccggcgaacaggtaggagagcagcaccgccgggcccgcttcggcaatggcgacgctggaaccgacaaataaacttgcgccgataacgccggcaatagataacatggtgacgtggcgtgatttcagcccgccccctaaatcatgtgattgcgacagttgccccatcattaaccccttttattgttttttggcaccgtttgccggatggcgattgcgcccaatccgaccgacaggcaaccggacggggcgcgtgagcgtcgccatccggtgcaggagtgttagccttgtttagcttcgttaaaacagtcggcgataatcttcagtccctgcgcgatctgcgcatcttcgatagtcagcggcaccagaatacgcagcacgttgtagtacggcccgcaggagagcaggatcaggcctttatcccgcgcgcgggcgacgatatccgccgtcagtttggcgttgggtttgctgtgatcgccctcttcaaagagttcaatggcgatcatcgcccccaggccgcggacgtcgccgatttcgcgatgtgtttcggcgatattgagcaggcctttacgcagcttgtcgccgagctgattggctttttccaacaggttttcctgttcgaaaaccttgagtaccgccagcgcggcggcgcaggcaatcgggttgccggcataggtgccgcccaatccacccggcgcgatggcgtccatgacttccgcccgtccggtgacgcccgccagcgggaaaccgccggcgatggatttggcaaaggtggtgatatccggcgccacgcccatctgctccatcgcgaacagcgtgccggtacggcccgcgccgctctggacttcatcggcgatcagcatgatgccgtgctcgtcgcacagcgcgcgcaggcgctgcataaaggccggggaggcggcgtagaaaccgccttcgccctggacgggttcgatgacgatagcggcgatatcttccggcgcggcgtcatttttgaagatgcgatggatgctggcgatcgcgtcatcatcgctgataccgtgcagcgcgcacgggtagagcgcgcgataaacgtggcccggcattaaccccatgcccgcggagtaagggttcactttaccggttaacgagagggtgtaatgggtacggccatgataggcgccggtaaaggcgatagtgccgctacgcccggtcgccgcgcgggcgattttgaccgcgttttccaccgcttccgaaccggtggtcaccagcagggttttcttggcgaaatcgccgggcactttctggttcatcatttcgcacagctgcaggtagggctcgtaggccagcacctggaagcaggtgtgggtcagcttcttcagctggccttccaccgcggcgatcacctcaggatgcaggtggccggtatttaacaccgcgataccgccggcgaaatcgagatattcacggccttcaacgtcccatacccggcagttctccgcacggtcggcaaagatagggtgaatttgtccgacgccgcgcggcaccgcgtcgctacggcgctgcattaacgctttattgctggtcatgtcctgctctcctgttaaaggccgatacacatatatttgatttctaaataatcttcgatgccgtacttcgaaccttcgcggcccagaccggaggctttaatgccgccgaatggcgcgacttcgttggagataatgccggtattgatgccaacgatgccgtactccagcgcttcgccgacgcggaagacgcggctcaggtcgcgggcgtagaaataggcggcgaggccgaattcggtatcgttggcctgggcaatgacatcggcttcatctttaaagcggaacagcggcgccagcgggccgaaggtctcttctttcgccactttggcgctgctcgggacgttgaccaggatggtgggctggaagaagttgccgcccagcgcgtgcggtttgccgccggtgacgatgcgcgcgcctttcgcaagggcgtcggcaatatgttcttcgaccttagctaccgctttatcatcgatcagcgggccggtggtgaccccgtcctgcaggccgtcgccgatgcgcagcttttccaccgcctgctgcagtttctcggcgaaacggtcatagacgccgtcctgtacatacagacggttggcgcagacgcaggtctgtccggcgttgcggaacttcgacgccagcgccccttcgacggctttatcaaggtcggcgtcgtcaaagacgataaacggcgcgttgccgccgagttctaacgacacttttttgatgtctttcgcacactgttccatcagttggcggccaatttcggtcgagccggtgaaggagagcttgcgtaccagcgggttgctggtcagttcgttgccgacagccccggcagagccggtgaccacgttaaataccccggcgggaataccggcgcgattcgccagttcggccagcgccagcgcggaaaacggcgtctggctcgccggtttcagaaccatagtgcagccggcggccagcgccgggcccgctttacgggtgatcatcgccgccgggaagttccacggggtgatggcggcggtaacgccgatgggctgcttgatgacgatcaggcgcttgtcggcctgatggccgggaatggtatcgccgtaaatgcgcttaccttcttcggcgaaccactcaataaaggaggcggcgtagctgatttcgcctttggcttccgccagcggtttcccctgttcgagggtcatcagacgggcgagatcgtcctggttctccatcatcagatcgaaccagcggcgcagaagcgtggcgcgctctttggcggtcagggcacgccaggctggcagggcgcggttggcggcttcaatcgcttcgcgggtttcgtcggcgcccattttcggcacgctacccagctgctggccgttggcggggttggtcaccgcaatcacgtcgccgttttgcgcatcgcgccactggccatcaattagcgcctgctggcgaaacagagttgcatctttaagttgcataatcgcttcctgtcttaaggggttaacgagtaaaagcggcgtgtagtgtctccacgctacgtgccgcacgcagcgtgcgtccgggattgctctggcttgccagcagggtttgcaccttgctgacgatgtgcgcgccgatcgggatagccgacgtggccgccggcgacggcgcgttacaggtgtggatggaacgcgcggtagtgacaaagaggaaatcgtcgatcagcttgccctgcggcgataccgcctgtgcccgcacgccggcaggccacgggcgcaaatcgcttaatgtcaggctcgggcagtatttctgcaccagccgcagatagccgcttctgcacagcgaattcttcatttcgccaagcccggagcgcaggttgttttgcagtacccggcgaatgccgggcgaggtcaggatctcaagggtatcggtcagcgagatatcgcgcttgcgatagccttcgcgcttcagcgccagcaccgcgttagggccgacggtgacgctaccgtcgatcatgcgggtcaggtggacgccgaggaacggcatcgccggatcggggatcggatagatcaaatgattaacgatctggttgtgctgcggcgccagttggaaatattcgccgcggaacgggcagatgataaagccgggatcgacgccgatcattttcaccagccggtcggccatcagcccggagcaggtgatcagcgtcgatgcttcatattcaccgccctggcgggtgtggacgaccacgccgctggcgtgctctttcagggcgctaacttcggcatcgtaaacgatctttccgcctttggattcgaagatcttcgccattgccgccgctacttcacgatagctgacaatgccgctcgaaggaacgaagatcccgcccagtccgctgatgttcggctcgcgttcgcgcagctcgctcgcgctaagccactcgcgctgcaggccgttagcggcggtgcgatcccacagcgcgcgcatccgctccatttccagcggcgaggtggcaaccagcatcttgccgcagacgtcgtagcgaatcgcattctgctcgcaaaaggctttagtggcgcggttgccggcgaggcaaaactgcgccttgaggctgccgggagtatagtaaacgccggcgtggatcactccgctgttgtgaccggtctgatggcaggccggaccggactctttttccagcagggcaatgcgggcgtccgggtaaatctcaattaactgcatggcggtcgacatgccgataatgccgccgccgataatcacgaaatcatacatccgctcaattccttcgcctgagaatctttattgatgagtctggtaatgattcgtggaatacgcaaagtagccgcgctggcgcatcagttcgcgacgcagatccggatgcggcgtaaagcggtcgcgaccgtgcagccagaaaagattgtttatcaacaggaatttacccaccggcaccggtacggaaagaatgtttttactggtttccagcgcatcggagaggcggctcagccaggtgccttcttcgaaatctttcggctgcacaaactggtcgatatagcgcattaccgggcggccctgctggtcgacgtcgaaaaccggatgatagacatctttgctgacgtttttgctcggcggtgcggcccagcgcatcggacggcgggccagcggatcgcggaagaattcgtcgagatgttcccagtcatccagatgcagcagcagtgaattgccgccctgcatgttctgttcatcgatcttcatcatcagcacgtagtcggtaatttcttcgacataggtaccgtcattgtgcagctccatcacgcggtgcggctgacgcagatagctgtctgagttatcgacgtttttcaccacgaagcgggcgtaatactggccgctcatggcatcaaagttggagcgtccgatcaaatgcgccacggcggtagccagcttgaccatctcatcggcctgggcgacgttatcaatgccgataccgttgatcagcagcgcgccctccgcgcgattgagcagcgtcttgatcagcagcggctgcagctggttgccgcacatatcatcgaggatcttgccgacctgaaagcgcaagaaggatttgtattccagcgcctgcaccggccactgcgcgacctgttgaagaaattgcgcggtcgtttcggcggtgaaggtcagctccagcagacgcggcgattgcgcggagggagcgaaggaaaaaccggtgtagctgtgggccaaatcattagcatgaggttttacggcggtcagtgcattcatcagaatcattcctcgggtagagtcagagagtcggggtgatgctcatttcgtagccataaattaaaaatatctacatttttgaaaaatgcgtatgaaatagccatattgtttaatttttgtgatcactagcaacaataagttaacaatatgagaggcgaggacagacgaggtaggaaaagaaaaatgccagaaaatgaataagttgaagagaggacggacagcccggatagcgggggagtggatatccggggaaaagcggggttatttctcgacgctggccaccagggcttcaatggtttgttcccgccagagaagcccctgcagggcaaaccacggcatgttttccagccactgaagatgggcttcggtttcaataccttcgacgatcacctgatactgattcgcctgaaaatagtgcagcagcgagtccatcaactgctggccgtttttcttttccagcaggctccataacaggttcttgtcggtcttgataaaacgaaagggttgcgccgtcagggcggcgaacccggcgtaaccggcgccaaaatcatccagccagaaggagtatttgtccgtcagggcatcgatggtcggggtgcgtttcaccagcgtgttggaaaattcattaacctcaaaatgcaggcagccgatggttttcacacactcggcgataaaatcatcatgcagcatatgcaacgtcgactcgtcgacgttgagcgtgaccatgacgtcgttctggcggaaccactgctgatgctgcctgaccagctcaatttgttcgagcaggatgcgggcgcgcagtgattccgatgcctcactgaaaaaccgttctatatcttgcggactagcaggctcgtgatgagcaaaccgggtcaaacattcaaccgcgatcattttgccttcgcggttgaacatcggctgaaatacatagcgtaacccggtcggttcggtggtggtcagcggcattttgcttcactatttaaaggtaacgtcgatattggccgtcgcattaaaggtgccgattttgggcttaacgcttagccatttcaggctggccaggaagttgctttctaccacgctgccgttaatcatgcccaactgcgtcggggtattcatggaaagccaggtcgtcggcgcatcggcgcgcgagagcaggatgccaaaaccgctatcgttggatggcagaatggtgttggtgtcctgagtcggctgctgggtactgaagctggccattaaggtctgaccctggcaatcctggccggcgccggtcaggtcggcgcggacgctgaacggaacctgtttctcaatggcgccgacgacggcattgcgcgccgggatgctgccgaagttgaccgttgaaccattgttcgccgagacggtgattttcgggttgcaggcgataaagcgaatattaccaagcccggtgacccacgcgcggaagttactattcgggcggctgttgaggccgccaacaccgtcaacctggaagatagcgtagcggttggtgtcgttaatcacgccgtttgacggcggcggattgccggtggctttaatataaaccgagtaggtcaccgtgacggtctgcggggtcgccggagactggcatgcaccgccgggacggttgcggcggcagagcgtacctggcccgatatccgttttctgaccttttaccggtttaatatcggtgctgagataggttacgccgacttccagcgagttgtggatattctgcatccgggtttccggatcccagtacagatacgcatcttcaccattgggcatgtgatccgtatcggtacaggtaaaggtggaggtaaacgtcggcgaacgccacagcagggtacccggcttcaggttagcggtcgaaacgttaatctgatcggtgagcgcgatggtctgcgatacttcggtaccgttcttcttacagctcagcgcgaagctgctggtggagaacagcgcgcttgagagtaccagcagcgtcagcccggtgcgggataagaggttaaacttcgacataactaattgtcctttcatgttatttacaggtcagggagacgacctgataaccaccgggttgatcggcttgaatagcaggtaactctggcaccgtcaggctgcaggaggcgtcggcatcgtcgccccatttcatctgcagacggtcgccgctctgaacgccggacacgtaggcttcgccgcgggtaccgaccacgccgacatgttcgccgttctggccgaagatattggcgccaatcaccggcacgttgccgtccgccagtttggcgtggataagcaggctctggccgagatgcgtttcaaaggtcacacggccgatggcgcgctcggtcggcacgatatctttcgccgccagcggaatttcaaggccgttgccaatatccgaagtacgcagcgcgacgcggttgtggcgatacggcatcgcagaagtgagcaccgcgtagccgaagcggtcaatcgctacccctggctggttttccagacgcacgccctgcgcccctttcgctttcaccaccacaaaggtgttttgtagcggctgcgacagggtgacgccgccggagtgcgcgaccacgccgccggagacgttcagcgaagtctgctgatagttgttgttgtagctgtagcccagatcgacgttacccatgctgcccagataacccaggttgaccaggctggtatcgccgccgtgctgggtgtggccgctctgtacgaagtaattcatacggttgtcatcaagcagcgtgccgctcatcccggcgctgtagccgctaccgctctgcttgctgttggtggcgttaaagttaaccgtgctttcgtggtccgggccaaagatgttgattggcaccgagacgttcaggttaacgctgttgtcgctatagccgtagttactgcggctgttctggtaaaacacgccgacgctgacgcgattccaggtggtgttgaaaccggtctggatggtgcggtcgtatgcggaggtgttccagtagttctgacggataaaggtcgcgtacagcgaagcgccggcgatgtgctggttgaccgtcatctcgacgcgctggcgtttgttgttgtactgctgcgagtcgtagtaacgacggcgctggttttgcgtcgcccaatccggcgcgccggttttatcgtcgctctgatcgtaatactgggtgtggtagaaaccgttctgccagttgttacgttcagctaccgcgtcggagaagtcatagaagcccgacgtcgaataacggtagccggcgatctgcacgtcggtaccgagggtgttgagcgatttggaatagaggaagcgcacgctggcgccgcgtttgttctcgccggaagccagatcggtatcagaccatgaggcgtcaacggaggctgccccgtattcgcccatgtttttacccagcccgaccacgccggagcgatagtgctcggccatgataatcccgccgtatggcgtatagtcggagccggcgccgtgggccacggtgccctggataaattgcggctgataattattggtgccgtcgtggtatttacccgcggtcacctgatactcccagatcccgtcgcgcagcatattcggcacggaggagtaaggcagggtgaagctatggcgagagccatccgcctcgataaccgttacggctaagtcgccgctgagggtgcttggcgaaatatcggtcagcgcgaacggtcccggcggcaccacggtgctgtagacggtatagccgttctggcgcacttcgacgcgggcgttggtattggcgacgccgcgtacgaccggcgcgtagccgcgacggctgtccggcagcatttccgggacgctggaaatctgcgcgccgcggaactggaagctatcgaacacgttattattggtgttgctctggccaatctgaatacggctgcgccaggaggcgatatcggtttccgcccaggtggaaatcgggttccactgctctttttgcccggtctgttttgacagggaagagttgttgcgaaaacgccacgcgccgacgttaaggccgttattgagggtcaggaagtagtagtcgctgtcctgtttgctgctgccgctggagaaacgggagtggctgccgctgaaagcgtagttaacgaaaccggcgttgatgccgtcgtcatagaccagcggcgaaatctcgccctgtggtcgcgcttcgagttcggtttgcggtacggaaatgttcagctcctgcagcgcggcgttccagctcacgctactgcctggaatattttttaccagatcgtagcaggcgctgctgccggcggtgtccggtaccagaacgccgtatgaacggtaactgtcggcatctaaacagaaataacccggggtgttaggcgtatcttttttaaattcgatttcccggtgatcgacgcgatttttattcaggtaaatatcgaaggaatatttacccggtaaaatatcgtcgccggtagagaggttttgcaccagcgaggcgttattcgccccgcggatgaaagaggtattgaattgctcttcggcattgacaaatggtgtcgccagtaatgacattgtcgaggcgtaaacagcaaagcgaacgtgctgcgccagacatccagggatcgtccttattttattatggctagccattgtattgctctcttactgaatgcggatatctttaatttccgtatgtccgccaaaatcattgataaaagtgaatgacatctgatccgctgccgccgcgccggctggcaatttgatgttcagagagtccatggggttaaccatgtcagcattcactttccaggtcttcgcgccgctcttcagcgtcagtacgccgaaagtcacgtgcagcggacctttgttagtcacgaccagatcgttaccttgcttacgccaggtcagggcctgcgcttccttttgcaaggtggttttcagcgtggtagggcggtagaacagcttcacgcgggtacggatcgcaatctgcagtacgttttcttgtttcgccgaaggcggaatttcctgcacgttaatccagtacacggtttcgcggtcggtcggtaatccgctgccggaataaacaaagcgcaaaatagcgtctttattgcccgccagttttaaaatcggcggaatagcctgcatcggtaaattggttggcgttgcggtggcgtcaccggtatcaagccaggtctgaaccatccatgtttcatcggtatcattgtgaatggataacgccgcagatttttccccgccgttataaataacccgagtctgatcgacctgaatacccgcaaaagtatccagcgagacaaataacaataaagcggttaataactttttcatttcacgttccaaataatggtaccggccatccatggccaaaaacatttatccgtaattatttgtactcgatggtaaaggtggcgtttgcgttagcagagccagcttccacggttttcaggaaagatttgtagcgagctttcagattgaataccgcagtgccgctgttgtcgtcagacgctgcaacgttaacccacggggagttgtcgtctgcgctctggttgattgggacgattttttcgtcgttggtcaggatttcgatacctacgcctttcgcgttatcaacggacagcaggttcgggttaccagcaacggtcgcaccgtcgaagcgcagggagtaatcaccggcttcacatttttccaggttgatggtgaacgctttagaagcggtaacatcgccaacagcgttgaacgcggtagtcgggtatttaccgatgaaaacgtctttgttctggtcggtagaagtcacagtacaggttgactggatgatttcaccggtgaagttgaccttgccgttaactgcgtaagcactggtggcggacgcggacaggatcagtgctacaacaggcagtaatttcttattcattttaactccatgtacttaaggggataaccatagtggtaatcaaacacggcaagcgaataccgtgcagatgggtatccagataacctatgttggcgtgttgatcgcgatgaaatatacagcaacagttttcgcgttttgattgcttcggtgacttaattacagaaaattaatagacataaacgatgcacttgatcggacttatctgatattggcaaccataataattttatggtcagcggggggctggagaggatgttatggggacgggtaattaattaaaatgttgttttttaaagttttttattgtttttgtttatcagagggaaaacgtttctgcgcaggccagggcaaattaaaaacgctgcataatccagcgctatgcataatgtgtaagcgttatttccaaatgtttcctatttccttcgggagcgtcttctgatggcgcattactccgccgaattaaccccttttaaggcctccgccagccagcgggaaaaatgcaacattgccggcgtttccagacgcgattgcaaacgtgtcagccagtagttgccgagatcgatatgaatcttaaacggctgcacaatgcgtttttcttccagcagatggctgaacatttttaccggggcaatagccacgcctaagcctgcctgcgccgcttccagcatggtcacggatgagtcgaagacaataacccgatgggttggcgaaggcggcaattctcccgctgcctgcatccacgccgaccattcgtcgcggcgataagaacgcagtagcgtgaactgcaaaatatccttcggatgatgtatccgggcggctaacgacggggcgcacagcgcggagagcggggcggcgcacagatactgcgcggcggtatcatgccaggcgccgccgccaaagcgaatcacataatccagcccctcggcggcggggtcgacgcgattattatgggtggatatctgcaaatcgatatgcggacactcgcgccagaaggctggcagcagcgggaacagcacacccgtggcgaaagtgccgactacgccgatcttgagcttctcctgcgcctggtgaccggtgaaacggtcgagcatcccggcaatcctttcaaacgactcattgagtaccggtaacaggccttctccttcggtggtgagcttgaggccgcgcgacacgcgaacgaacagctgacagttaagatgttcctccagcgtcttcacatgctggctgatggcggagtgggtgacgttgagctcaatcgccgcgcgggtaaaactgagatgccgggcggctgcttcaaaggcccgtagtgaattgagaggaagatagctgcgtgtcataacattatccgttagaaaaattaaagcctgctgctaaatttaacagtttgtcagcgcagagcaaaacaccgacactgagcgcgtctgaagggcccggacgagagtggatattgagcgagaaccgataatggaaaaatacttcatgatgaaaaaatcccttacaggcgtactgctgctgggcgcctcattttcgacttttgccgcgccgcaaacggcggagcagcttcgcgaactggtcaatcagaccatcacgccgttaatgaaagaacaggcgataccgggcatggcggtggcggtgatctatcacggcaaaccctattatttcacctggggccaggccgatgttgccgggcagcgtccggtgacgcgacagacgttgtttgagctgggctctgttagtaagactttcaccggcgtgctgggcggcgatgcggtggcgcgcggtgaaattaagctcagcgatccggcgcagaagtactggccgcagctcaccggccagcagtggcaggggatctcgctgctgcatctcgccacctataccgcaggcggtctgccgctgcaggttccggacgaggtgacggatgaagcggcattactgcgttactatcagaactggcaaccgcagtgggcgccgggtagtaaacggctgtacgccaatgccagcattggcctgttcggcgcgctggcggtgaaaccttccggcatgagctttgaacaggcgatgagccagcgggttttgcagccgttaaaactgagccacacctggattaacgtaccgcccgcccagagcaaggactacgcctggggttatcgtgacggtaaagcggtacatgtttcgccggggcagctggacgctgaggcttacggcgtgaagtcgagcattgaggatatggcgcactgggtgctggcgaatatgaacagcgaagcggtgcaggataaaaatctgcggcaggggatccagctggcgcagtcgcgctattggcgggctggggagatgtatcaggggctcggctgggagatgctgaactggccggtgccggccgaggtagtaattaacggcagcgataataaggtagcgcttgccgcgacgccggtaacggcggtcaatccgcccgcgccgtcggtgaaagcctcctgggtacataaaaccggctccaccggcggattcggcagctacgtggcttttatcccgcaacaggatctcggtatcgtgatgctggcgaataaaagctaccccaacccggagcgggtgaaggctgcgtatcatattcttgaggcgctgcagtaaggatgtttgcgctgcgtttacctgggctacgggttggcactagctggtagatactgttatcggtttgcaaccttttagcttgagaaaagcgtttatctcgtttcgctccagagtatcttgcgctcccggttaatttttctgcaacatgttttccgtggcgcagggagcgcacagggggcggccagtcgccgcccttgcaaatcacggccctcagcccgcatccatgcaggctgccccggaccgtaggccggataaggcgtagccgccatccggcgtacaggcggctccctacctgtggccatgcccggcggcgctgcttgcgcgggcctacagatttagtgcaatgggtgggcccagtgccataggtagcccgtatatggtgcagcgcgcgctatccgggagagggcccgcttcatcattggcaaattgctcaatgccgctacttgcgaatggacgcaatctgctgaaaactaacagcgagatggcgaaccacagggaacggcaatggctggacgtatcgactaccagattgaaaaatttcagttcatcgagcgcaacgaatctccgcgtattacccgccagtgggcggaagtcattgctgaatgtcagcaggaaaaggcaaacagtgaaacgcgtttgcgtactgcgttgctgaatgtcgactacgccaccagcttcgaactgccgtttcgtttattgcttatccgcgccccgcagctggtggatcgcttacgccatgcactggcgttgaatcaaaagaacgtggtgattaatggtaagaaacgcggctgcgtttacagcctgaaagccgatctcagcgctgtaccagaggagtttcgttatcgctttgtgagccggattactcgcagcggaccggatgcgctctccgccgcgccctatcagcagctggcaaaagagataaaggcgccgcgcgagcggttacgtctggcgctggaaagtggcttgcaggtcaatgcgctggatgggctgttctggtttggcatccagcgtatcgccgcggatatttcggcgctgcgttctgcgggaatggcgattacgactgcggaagtggaggtggcggatagtctgaccagaacgacgagaatgatagcggcgtatcaggtggcgacctgctcccgttgattaatacacaccgatgttagtaatgtcttcataagctccatgaggatatccccatgaaaaaactaataaaggctcttgcctttatgccaaaacctttaacacggacgatcagtcatagagccagcgcccggctttagcactttcaataaacatttgtaccgtcaatggttctggtttgtggtggtctgttttgaggtattcaggaagaatggcgtttggaagaaaccaaatacccgtattgggaaaatagcgacgaaagttaaaactctcgatatcaacattcaatgattcagagtaatcatttagaaatgagttcatatcctctggaagcactacatgatcaccatcacttagtgatgtatcattgtccatcttccaaaagtgcttttcgatcagtccgtgaacagtagcatcgatatccatacctatttccccgtaattaatcgataacggtgaacaacattattagtaataacgccaatatcgtaaacagtgatcacaacaccaatccactcaacgtctagtctaatgtagccgccaatactggcagtgtatgccgcaatccttgcggagtatcgacttaatggtaagtgtctttttacgtttttcaaaagagcctgtgaacactttacggaaaacgagagatagaggacttgtgtctttggttgcgcggcggtaattaatcttacctcttacagggactaaaggcagactaagaatcattgagcgccgcacgaagcgcggaactttgctaagggtcttggtatgaggattagagacgctggacgtcttctggcttcaaaggaaaatctgtacagggttgagcacggtaactacctgcccataggttgtacgataccaaagccagtacaacacaggcgtttgggtgtgattttagaagatacgatctcttggggattttaacctaagtcattgactttcttagatggtgccgataataggagtcgaacctacgaccttcgcattacgaatgcgctgctctaccaactgagctatatcggccctgaaaggacgcgttcaccagcgtgaagcacggggtagaaggttaaaactaagtgggtgatgcgtcaatgccctttcgaatcaaacggctacttttgcatcacccgcttagcgttaagcacgaatggtatcgtcgccgaaaccaatccacttataggtagtcagcgcttccaggcccatcggcccgcgggcgtgcagcttctgggtgctgaccgccacctccgcgccgaggccgaactggccaccgtcggtgaatcgggtagaagcgttaacgtataccgccgacgaatccacttcattaataaagcgattcgcatggcgcagggtacgcgtcagaatggcatcggaatgctgggtgccgtgcgcgcgaatatgggcaatcgcctcatcgaggtcggcgacaactttcacgttcagatccagcgacaaatactcgtcgtcgtactgctccgctttcaccggctccaccttcgccggaccattctgcaggaggggcagggcggccgggtcggcgtgcagcgtcacgccgctctccgccatctgtttgctcagcgcaggcaggaaggtatcggcgatattacggtgtaccagcagcgtctcggcggtattgcaggtgctcgggcgttgggtcttggcgttaacgatgatcttcaacgccggtgcgatctctgccgaatcgtcgacgaaaatatgacacacgccgataccgccggtgatcaccgggatcgtggattgttcgcggcacagcttatgcaggcctgcgccgccgcgcgggatcagcatatcgatgtatttatccatcttcagcatttcgccgaccagcgcgcgatccgggctctcgattgcctgcaccgcggcagccggcaggccgcactcctgcagcgcctgctgaatcactttcaccgtcgcggcgttggtgcgccaggtctctttaccgccgcgcagaatagccgcgttgccggtcttcaggcacagagaggcgacatcgacggtcacgttcggccgcgcttcataaatcacgccgatcactcccagcggtacgcggcgacgttcgatacgcaggccgctatccagcagaccaccgtcaatcacctggccgaccggatccgccaggctacacacctgacgcacgtcatcggcgatgccgcgcaggcgcgccggcgtcagcgccaggcgatcgagcatcgcgtcgctcaggccattggcgcgggcgtcgctgagatcttcggcgttggcgcgcaggatctcttcggtctgcgcttccagataatcagcaatcttgttgagaacctgatttttctcgcggctggaaagcagcgcgagttggtaagaggccgctttggccgcaatgcccatttgttccagcattttcagctccttaacgggtaatcatatcgtcgcgatggacggccaccgggccgtattcatagccgaggatggcatcgatttgctgcgagtgctgcccggcgatcaggcgcagggcgtcgctgttatagcggcttacgccgtgagcgatatcgcggccttcgctactgcggattcggataacttcgccgcgggagaaattcccgctgacggttttgatgccttttggcagcaatgagcttcctctttccagaatagcctgggtcgccccggcatcgacggtgatttcaccggccggcggcgcgccgaagatccagcgtttgcggttctccagcggtgattcctgagcgtggaaacaggtgcccaccggcaggccttccatcgcgtggccgataacgtccgggcggttgccggcggcgataatggtatcgatgcccgcgcgacaggcgacgtccgcagcctgcagtttggtgcccatgccgccggtgccgaggccggaaacgctatcgcctgcgatggcgcgcagcgcgtcatcgatgccgtagacatctttaataagctcggcctgcggattgctgcgtgggtcggcggtaaagagtcccggctgatcggttaacagcagcagtttatcggcgccggcgagaatggccgccagggcggaaagattatcgttgtcgccgactttgatttcagcggtggcgacggcgtcattctcattaatgaccggcacaatattgttatccagcagcgcgcgcagggtatcgcgggcgttgaggaaccgctcgcgatcttccatatcggcacgggtcagcagcatctggccgacatgaatgccgtaaatagagaaaagctgttcccacagttggataagacggctttggccgactgccgccaacagctgttttgaggcaatggtggcgggcagttcagggtagccgaggtgttcacgtccggcggcgatggccccggaagtcacaatcacaatgcggtgccccatggcatgcagctgcgcgcactggcgcactaactcaacgatatgggcgcggttcaggcgtcgggatccgcccgttaaaacactggtgcccagttttaccaccagcgtctggctatcactcatgattttctgccgttcaaaaggaatatcgagatcgagctgatgttgtaacaggagtcaggccgcttgccaactgctggcgtattggtcaagccattttattgcgaggatcgggcattctgcgtaggcaaggtgacatatttatgacggaaatatttaaacattcttttttataaaaagttccatttcgtcataaatatttaacactacagcgttaaaaaacctccagtttttgacggggccttcgcccggaattgataagcgcgtgtaaataaatcaccaggaccacataatgaaaaagcgttcactggcattaatgatgatgggttttgttgcttcttcggcttcacaggcagcggaagtatacaataaagacggcaataaactggacgtgtacggcaaagtgaaagccatgcactacttcagcgattatgacagcaaggatggcgaccagacctacgttcgcttcggtatcaaaggcgaaacgcagatcaacgatcaactgaccggttatggccgctgggaatccgaattctccggcaataaaaccgaaagcgattcctcgcagaaaacccgtctggcgtttgccggcgtgaagttaaaagagtttggatcatttgactatggtcgtaacctcggcgcgctgtacgacgttgaagcctggaccgatatgttcccggagttcggcggcgactcctccgcgcagaccgataacttcatgaccaaacgcgccagcggcctggcgacctaccgcaacactgatttcttcggcctggtggatggtctgaatatgaccctgcaatatcagggcaaaaacgaaggccgtgaagcgaaaaaacagaatggcgacggcttcggcacctctttaagctatgatttcggcggcagtgatttcgccgtcagcgcggcttataccagttctgaccgtaccaacgatcagaacctgctggcgcgcggccagggctccaaagcggaagcctgggctaccggcctgaagtacgacgccaacaatatctacctggcgacaatgtactctgagacccgcaaaatgaccccgatcagcggtggttttgctaataaagcgcagaactttgaagcggtcgcccagtatcagttcgatttcggtctgcgtccgtctctgggctatgtactgtcgaaaggcaaagatattgaaggtgtcggcagcgaagatctggtcaattatattgacgtcggcctgacctactacttcaacaaaaacatgaacgcctttgtggattacaaaattaaccagctgaagagcgataataagctcggtattaacgatgacgacatcgtcgcgctggggatgacctatcagttctgataaagctgagcgtaataaaaataaaaccgcggccttgagcgccgcggtttgcatttgtcaggattagcggtttttcgccagatgcagatcgtcgttattcatggtgacctgcgcgttatattccttcggcaagcgccgcgcctgataaaatacgcggttccagtacggattatccagcgacgaacgcatgacgccctggctggcggaggcgtgcaggaagttgtggtcagtatcgtagaaaccgacgtgcatgccgccgtgaatgcggaagaagactaaatcgccaggtcgcaactgctgcttgctaacgcgcacccccatatgcagaagatcgccggtggtcacgcggtccattggcagattgaagcggtccttcagcgtacgccagacaaagccggaacagtcgacgccgctctggtcggtgccgccccattcataaggggtgccgtcccaggtgtgcatctgatcgtgcagggctgccagcaccggtatcagatcgtcggagccgctgtcgatcggctcataatgatgctgcgccaccgccttgggcggtttttttggggaagatgaacatcctggcaaaatcaataaaggaacaagtaataaagcgtgggtgagtttgggcttcatgtcgttattttcatgttagggatcgaccgtcgccatttatagcgtattcagggaaacgtcagaatgatgaaacgcaaaatttacgaaaacttacgtaccgcaggcataaattcgccggtaccgtaataagcacatttttcagatagtaaacgcggtgattttatttattaataaatgtttactatctaaatcaaaatataacaggccagaatcaggatgttcttatttatctgacgcgagagacaggcgtgcctcctttaagatggcggataaaagaggctggcgcatagcccatcgctttgcggaacatggcggtaaatgccgccggatgctcatagccaaggcttaacgccacgtcggtaatgcttcgtccttctcgcagggcggtgagagcgtacatcaggcaggctttatgacgccagtcgcgaaacgccatcccggtctcctgcaaaaagcggcggttgaaggtacgcaggctttgactcatcttttgggcccacagctccggcgtactgtgaatctccggctggcggagaaacgcgctgcatagttcagccagccgcggatgttgcggtagcggcgtaaacatcggcagcggcggggcggcctgcagttcaaacagtaatagggcgataagcgccgcatcatgtccgctctcttcatacaacagcggcaactggcaggcggccaatagcagttgatgtagcagcggcgaaacctgcaatacttcgcagcgtaccccggcgcgcggcgcgtcctgcggttcgatatacaggctatgggtgctcacgcctggcatccagacgcgatgcggtttattagcgggtatccatacgccgctgaacggcggcaccagccactggccgtcatcggtttcgactttcatcaagccattcacggcatagagaaactgcgctcgccggtgatgatggcgcggtaaaagggtgtcaggcggataatcgctacccaggcctaatacccggcgcggcagatgatcgacatcattaatcgcgatattgcgcatgcgtactctcctggctgaaaatcgtaatatattggcttttaatcgtaagtcagccattccgctattctatatcgttacctccctgaatggaggaacggtagatgatatttgggctttttgtttgtggactgttgtccggggtaaccacctggctgtttggcttcggcggcggctttgttaccgtgccgctgctttacctgttgctgagccatcagggcacagtaggcggtcaggcgatgcaaatagcggtagcgacgtcggcgctggtgatgctgtgcacgtcgctgttggcaagcggccgccacctgcgcgccggaacggttcactggcgctccctgctgccgatacttggcggcatcgccatcggcggtattgccggcgcggcgctggcgctgaaggtcaacggcgagtggatccgctggctgttcattttgtacctggcggtgaccattgtggattgctacgctcgccccggctttatggcgccgtcgacggcttgcgcaccgtcgagtgcagggcgcgagactatccttggcggcgggattggcctgattgccgccttccttggcgttggcggcagcgtgatgaccgtgccgctgatgcgccggcgtggcgcgacgatggcgcaggccgcggcaatggccaacctgctgacgctgccgctggcggcgaccgccagcctgacgtggctgctgatggcgccgatggcggcgctgccctccggtttcatcggtaatatctggtggctggcggccgggctgctggtggccgggagctggttgggattgcggggcgcatcgcgctggttggcaaaactccccgatcgctggcacgtgcggatctacccgctactattgctactggtgttgctggcgatgggctttggcggggtgggctgaaagcgctggcggatcatgctcctgtcatcttctttatacatgctctcgcaggcttatattactgattatggaaaatgactaatgtctaatgctgtgacgattttcgatctggataacaccctgattaaaggggacagtagtacgctgtggagccagtttatggtgcgcgaaggctgggtgagcgatccggaatatctggcgcgcgaggcgcagctgatggcggattacgaccgcggggaaatgaatatcgccgattatgttgcgctgattcaggcgccgctgatcggcatcccgcaggcgcaggtggatacgctggtggcgcggtttgtgcgcgaaaaggtgttgccgcgggtctacccgcaggcatgggacgttattcgtaccttacaggcgcgaggggagaaaatgttggtgatctccgcctcggtaacgctgctggtgcaggcgatagccgccgagctggggattgaacaggcgttgggtattgatgttgaaatggcggatggcggctacagcggtgtgattgccggtactccgagctatcagcagggcaaagtgacgcgcctggcacagtggcgggaggcgcatcctgactatactggcgaagtcactttttataccgattcgataaacgacctgcccctgtgcctgcatgcggatcgcgtgcggttggtcaacccgtgtccgcagctgcaggcagccaacgcccggtacggctggccagtgctggcgtggcggatcgaataacgagacgttttccctgattggtagccccggtaagcgtagtgccaccggggagagggggttattgcggactttgatacaacggcactacgctgccgccgatgtaacggcggcgcagccaggcggagagggtgtccatcaccatgaccaccgcgaccagcaacagggtaataaacatcaccacatcccagttccacaaacgcatattttccgcgtaaatgaggccaatcccccccgcgccgacaaaacctaataccgcggcggaacgggtgttggattcaatctgatataaactcagcgccaggaaagtcgggaacgactgggtgaaaatgccgaagcggtgtttctgcagaccattagcgccgacggcggtgaggccgcggcccggcgaacggtctaccgcctcatggccttcagcatacaggcggcccagcaggccagtatcctgcataataatcgccagtacccccgccagcggcccgagccctacggcgcgcacgaaaatcagaccccagatagccatatcgataccgcgcagcatgtcaaacaagcggcgcatcaacacggcgataatgccgggaatcacgccgcgcataatattgcgcgccgccaggaatgacagcaacagcgcaatgaccgtcgcggtaatcgtcccggcgaagacgatggcaagcgtaatggcgatttgcgtgaagtaataggcaaacggccagttccagaagtcgtgccagacaaacatccgcagcagatagcgccccatctgctgtagtccggtagccagttgttcgctactgataccgaactgcataaagaaccagacgtaataaagtacgctcgccagcgccagcagggcgacgtagcgcagatatcgcccttgagtcttatacagcgcctgatgctggcggcggctggcggcgatatccggttgatgttgccattggctcattttttcccctccagaacccactggcgcaggcggccggaaagcatatccagcagcgacaccacaataatgatcagcagcagcgtcatgctgacctgatcgtaacgatcgagcttaatgttggtcatcagctcctggccgatcccgccggcccctaccaggccaagaatggtggatgagcggaagttgatctcaaggcgcataaaaccgtaggagagaaaaatcggtttcacctgcggccacagggcaaagcgcaccttctgcagcgccgatgccccgcaggccgccagcccgcgcacaggtttatcctgcgcgctttccaccgcttcatagaacagtttggtcaggctgccgaccgtatgcagcatcagcgccagaaaaccggggatcgcgccgataccgaacgccatgacgaaaatgaccgcccaggccagctcaggcatggtgcgtaaaaaggccaccagtacgcgaacggcgaagcgtagcggcgcgggtgaccaggcattattggcggcgaggaaagccagtattgtcgctaccgcgaccgccaccagcgtggaggccagcgccagctgcagcgtctcccaaatcagcggtagctgaattggcaggcgatagccccagtacgccagcgagcctttggtatgtgaatcggctaacagaacgcccggatgcagcgtcggcagcgtctcgaacatatagtcgagaaagtttggcaacgagcgccagatagtgggcagattaaactcggcggcgtgcccggcggcaaagtagagcgccagcagcaccaacgaccagccgaaggtatcgcgcttttgccgtgtcctgacctgctggtaataacgttcaaattcggtatgggtattattcatgcggcgaaaaggtctttaacgtagcgccgccgtccgcattgcgtcgcggacggcggcatcggtgcgggattaacgcgcgctaaccagctcgcgtttcatatcgatgatctgctggaaatcggccacgctgcccgggccgatgtgctgagtaccgcccatcgctttcacgaaacaggcgtgatcgtcggtatccagttttttaagcgcggtgacgactttggctttgaagtccgccggcagcgcattgctaacgaggatcgggccgttcgggatcagaggcgattgccagataatccggatttgcttcatcagatccggatgatccatgcgaatcaggcgattgaaagcgcccacgctgtagccgctgttgtagtcgccgaccatcgaggtccaggtgaccgcgccggcaaactggccgttcagcacgccgagaatgtcctgttcgtggccgccggagaaggtcacgctggagaagaagttattgtatttgttatccgcgtcgccgccgaatttctgtttaaaggcgtggtttggaattaaataaccggaagtggaatccgggtcggcgaagccaaaagctttgccttttaaatcgtccagcgttttatacgggctgtcagctttgacgatgaccaccgagtggtagccgcgggattgatctttatcgtcaacggcgataccgacaatatcgacggctttcgggttattgatatagaccgaggcataagaagaaggcgacatacttaatacgacatcgactttcccgcccagcagtccctgaatgacgccagaataatcggatgagttacgtaatttggtatcgaccttcagctctttatcaaggaactgtttcacgcactggttatcgccaatttgttgcgtggcgttttgaccgccgaggatccccagatttaattccttcggctgttcagcggcgctcgcttgccacgtcagtaacagagctgcgattgctgcggataaacgaactgcgccatttatatgtttgttcattattttgcctgtgtgtttttaactaaaggaaattaatgcaattggctaatttcatcgccgtacaaccgatgcaggacatcctgagtcagctgtgccggatgatcgtcgaatatgatgcggcctttggcgacgccaatgacccgggtgcagtactctttgaccagttcgaccgaatgcaggttgaccatcacgctaatcccctggccgctgatttcccgcagtacattcatgatgcgctgggtgtttttgggatcgagcgaggcgacgggttcatccgccagcaggatcccggggttttgcatcagcgcacggcaaattgctacgcgctgcatctggccgccggagaggttttccgcccgctgtagggcttgcggcaacatgttcatccactcgagaagggaaatcgcgcgcgcccggtcggcgtcagggaaaaccttaaacagcgacttcagggttgaggtttgactcaggcggccgagcagtacgttagtcagcacatcaaggcgcggcacgaggcagaagtcctggaaaatcatgccgcattcgctgcgccaggcattgagcgcgcgtcctttcaggcgtgaaacatcatgtggcatacccacttccggaaagctgagtatttcaccgccggtggcgctatgagtgccgttcaggacatgcagcagtgtggatttcccggctcccgagcggccaatcacgcccaccagctcgccggcatggaggtcaaagctgatgttatcgagaacggtttgctgcgcattataagatttactcaggttgcgcacgcttaagactttccgctgccgggttggggcgatgggcgtaattagcgaaaattcggtttccgccaccgcggcaagagagctgttcataagagtgtcctggttcgtcataaactggtcactattaatcgcgttttgtgtgaactttcgatgacggtaaggcgaaaaaataatgaaagcgtgatgaaacgcttacctgcaaggtaaaagaaacatgccagcggcaatcatagcgtgatggtctacactaatgaaaatgagagcaaataagaaagaaatatgagaactaatctcattctcttagatatcattctttcatgggattaatagtcctctgcaagcggtttttatgtttatgtttaggcattttgtgcggtgcttaaaaccattcacgcagcttattattgggcggatcgtcttgtaaatggctgttttgcggtattatcttcttgcttttatttgttattaagatttttcgcaacgtcatttatctcatccattaagaatattcctaatgaattagggttatgatcctggatgatataataatcgattcggattgtaggaattttcgatcaataaccacatgaaattaaatgttttttgtttttgagcaaaaaataggatttctgcaaaaagcaaaaaattgacataaatgagaattagcttcacatcctgcttgttgacacttaatcagaaaaaacctaaatttgaatccaacaaaaaatataaatcgataaataatttcgacattattaatgattaaataatgccgctggtgttttattataaccaatttaaacaggggtaatttgcaggtttaatctctgcaggcctggctatcggcgatggggtgaaaggtagtattccaggatgaagaggataaacagtatatggacgatcaatgctcccttgataagtgtatttggccagcacatgatacttattttttaaaaggcttgtcggaactcatcttagatatcgaagaacttatttatttgtcactggataaaatatgtaaggactttttgtttatcaatctgagtaccaatgcattaaattactttattcgcaatgacaacgactggttagccaaggccaagggcaaacaaatcattctgattgccgcgagaaagtcagaagcgttagccaattattggtattacaacggtgatattcgcggcgtggtgtatgtcgacctcgcgcgcgatataagaaaagatctggcctatgtaattaatggtcggtttctgcgtaaagatattaagaaagaaaaaattactgaccgggaaatgacggtgatcagaatgacggcccaaggaatgcatccgaaatctatcgccagaattgaaaattgcagtgtgaaaactatttatacccatcggcgaaatgctgaggccaagctgtattcaaaaatttataaattagttatgtaacgtttatttagtggtacaccgggacgacttgtccttaattaaactcaggatgaaaaagctatgaaaaaaaaggttattgctattgctctggtaacggcgtttgctggaatgggtgttgctcaggctgctgatgtcactgctcaggccgttgctacctggtctgcaaccgcgaaaaaagacacttccagcaaactggttgttaccccgcttggcagcctggctttccagtatgccgaagggattaaaggctttaactcacaaaaaggtctgtttgatgttgcggttgaaggcgataccacggcgactgccttcaaactgacttcacgtcttattactaacactctgactcagctggatacctccggctcaacgctgagcgtgggcgtggattataacggcgccgcggtagaaaagagtgctgacaccatcatgatcggcaccgctaacggcgtactgggcggcaacctcagcgcgctgtctaacggctacaacaccgcaggccgcaccaccgcgcaggacggctttaacttctccatcatcagcggtaccaccgacggcaccaccgcggtaaccgattacagcacgctgccggaagggatctggagcggtgacgtgagcgtgcagttcgacgcaacctggaccagctgattttctcgtagcaccgggcagggggaatacccctgcctcttcatggactgaacgcttatgaaaaaacatcttctggccattggcctgctgctgggattggcgaatcccgcgctggcgctggatgtcggcgatatctcttcctttatgaacagcggcagcagcacgctgagtaaagagattaaaaataccaccgacagcggccgcttaatcaacattcatctggaacgtctctcttcaccgctggatggcggcaaagtgatcccgatggataaacaggatgaagtcctgttgacccccgccagcttgttattgcccgcaaaggccagtgaagtggtgcgctttttctacaaaggcccggcggatgataaagagcgctactaccgcattgtctggttcgatcaggccttaagcgatgcccagcgcaatggctcccagcgcagcgcggtggccaccgcttcagcccgcatcggcaccattctggtggtggcgccgcgtcaggctaattttcgctaccagtttgccggcgacacgctgaccaataccggtaacgccaccctgcgcatcatcgcctacggcccgtgtctgaaaatcgccgatggcaaagagtgcaaagaaaactactacctgatgccggggaaatcgcgtcgcttcacgcgcgtcaatattgctgacaaaaaaggacgggtcgcgctctggcagggcgagcagtttgttcccgtgaaatagacatgtgtgctgatggattaagactatgcctttacgacggatcacccctggactgaacgcgctgcttgcctccggcatggttcttttgctggcgccttatagcgacagcatggccgccgagcgcgtgcagcaaatcggcggcgtgattatcccgcaggctttcagccaggctttgcaggacggcatgagcattcctctgtttattcatcttgaaggcagccgcgataatcagaacgatcagcgtatcggcgccgcgtatatctggcttgatggcgacgtgctgcgggttcggcaaatcaccctcgaagagggcgatgacaacgctcgcgttagcgacgagacacgtcaacagctcagacgtttatccaatgaggctttcaacgacgcgctgaagatccccttaaccgatgccgcgcagctacaccttagtctgcgccagttgctgttgcaactggtggtgaaacgtgaggcgctgggaaccgtgctgcggtcgcgcagcgaggatattggccagtcgagcgttaaaactttcagtaataaccttacctacaacctcggggtctacaacaaccagatgcgtagcggtggcagtaatacctccagctatctgtcactcaatagcgttagcgcgctgcgcgagcatcacgtggtgctcgacggctcgctgtacggcatcggcaccagccaccaggacaacgaactgtataaagcgatgtacgagcgcgacttcgccgggcaccgttttgccggcggaatgctggatacctggaacttacaatcgctggggccgatgaccgcgatttcggccggtaaaatctacggcgcgtcgtggggcaaccaggccagctcgacggtatttgataacagccagtcggcgacgccggtggtggcattcttaccggcggcaggcgaggtccacctgatgcgtgacgggcgcctgttaagcgtgcagaacttcgtcatggggaatcatgaagttgatacccgaggcctgccgtacggtatttacgacgttgacgtcgaagttatcgtcaacggaagagtggtcagcaaacgcacccaacgcgtcaacaagctgtttactcgcggacgcggcgcgggcgcgccgctggcctggcaaatctggggcggcaatttccatatggaccgctggtcggaaagcggtaaaaagacgcagccggcgaaagagagctggctggcgggggcatcggcttccggctcgttgagcacgctcagttgggcggccaccggctacggttacgataacaatgccgtcggtgaaacgcgcatcacgctgccgctgaccgaggcggtgaatatcaacctgcaaaacatgctggccagcgacagctcctggagcagcattggcagcgtcagcgccaccttacccggcggctttagctcgctgtggattaaccaggaaaagaccgttataggcgataagctgcgccgtagcgatgccgacaaccgggcgatcggcggcacgctgaacctgaacgccctgtggtcaaaactaggcacttttagcatcagctacaacgatgaccgccgctacaacagccattactacacggcggattattaccagacgatttatagcggctcttttggctcgctaggcctgcgcgcgggcttacagcgctataacaacggcgatagcaacgccaacaccgggaaatatatcgccctcgatttatcactgccgctgggcaactggttcagcgccgggatgacccatcagaacggctataccatggccaatatttcggcgcgtaagcagtttaatgaaggggcgattcgaaccgtcggcgccaatatttcgcgggcgatttccggcgataccggcgacgacaaaaccttaagcggcggcgcttatacgcagttcgaaacgcgctacaccaacggcacgctgaacgtcaacagcggcgccgacggctacgtgaacaccaacctgaccgccagcggcagcgtcggctggcaggggaaaaatatcgccgccagcgggcgaaccgacggcaacgccggagtgatcttcaataccgggctggaagacgacggcaagctcagcgctaaggttaacgggcgcatcgtgcagctcagcggtaaacgcaactacctgccgttgtcgccgtacagccgctatgaagtcgaactgcagaacagtaaaaactcgatcgacagctacgacattgtcagcggtcgtaagagtcacctgacgctttatcccggtaacgtggcggtgatcgagccggaagtgaagcaaatggtcaccgtctccgggcgcatccgcgccgaagacggcacgctgctggcgaacgcgcgcattaataaccatatcgggcgcacccgtaccgatgagaacggtgaatttgtcatggatgtcgataaaaaatatcccaccatcgattttagctacggcggaaataaaacctgtgaagtggcgctggagctcagccaggcgcgcggcgcggtgtgggtaggggatgtagtatgcagcggtctctcttcatgggcggcggtgcagcagacaggagaaggtaatgaaagctaagtggctagctctgatggtagcgatgctcgcggaactgtcgatatcgcaaacttatgccgcgatctcgaaaaccacctggagcgatgcgccagcgcgcgaattcgtcttcgttgaaaacaactctgatgataacttcttcgtcacccctggcggcgcgttggatccgcgtatgaccggtgcaaaccgctggacgggtttaaaatacaacggatcaggcacgatttatcagcagagcctgggttatatcgataatggctataacaccgggctcaatgcaaactggaagttcgacatgtggctggaaaattccccggtatcccatccgctgctggggctacgctgtattaactggtatggcggctgcgatatggcgaccagcctgattcagccgcagactaccgacgctagcggtttttatggcgcgacggtaaccagcggcggcgctaagtggatgcacggcatgatgtctgatgctttctatcagtatctacaacagatgccggttggcggtagctttacgatgaccattaatgcctgtcagacatccgtggcttacgatgcaagcctcggccagcgctgtaaagatcaggcatcaggtaactggtatgtccgtaacgttactcacaccaaagcggcgaatctcaggctcatcaacacccactctctggcagaagtatttattaacagcgatggcgtaccgacgctgggcgaaggaaatgccgattgccagacgcagactattggtagccgtgcgggtttaagctgcaaaatggtcaactataatttgcaaaccaatggcttgagcaatacgtcgatacatatcttcccggcaatcgctaactcatcgctggcgtcggccgtcggggcgtacgatatgcagttcagtctcaacggcagctcgtggaaaccggtgagcaatacggcttattactacacgttcaacgaaatgaagagttcggatgcgatctacgtctttttctcgagcaacttctttaagcagatggtggcgttgggtataagcgacattaacactaaagatttgtttaacttccgttttcagaatacgacttcaccagagtcaggttggtatgagttttctacttcgaatacgttaattatcaaaccgcgtgatttcagcatcagcattatctccgatgagtacacttcggcgccgtcacgtgagggttacgtcggcagcggcgaaccggcgctggatttcggctacatcgtcaccaccagcggtaaaaccgccgccgatgaggtgttgattaaagtgaccggcccgtcacaggcgattagcgggcgctcgtattgcctgttcagctcggcggacggtaccgcgcaggtgccgtttccggcgtcgctctctttcattacccaaagcggggcgacgaaaagttacgatgccggctgcgacgatagctggcacgacatgaccgatgcgctatggctgaccacgccgtggactgatatttccggcgatgtggggcagatggataaaacaacggtgcgcttctcgattgctatggacgatcctatctcgctgcgcaccatcaccgacaacggctggtttggcgaggtcagcgcttcaggagagattcatgtccaggcgacgtggcgtaacattaattaagctgacgctggcgagcctgtggctgctggccgcgccgctggcgcaggcgatttctgtcggtaatctgaccttttcgctggcctctgacgctgagtttgcggcgaaaagggtgattaacaacaataaaagcgcgcggctatatcgggtgtcggtgatgggtatcgaccggcccggcggccatgaggttcgtgcccgcccggcggacggcgaactgctgttcgccccgcgccagctgacgctgcaggcgggtgaaagcgaatattttaagttctattatcacgggccgaaggataaccgcgaacgctactatcgggtctcgtttcgtgaaattcccacccgcaacctggtgatgcgcgccccggcgggcgggcagatcagcatggagccggtggtggtgatggataccattctggtggtacgcccgcggcaggttcagtttaaatgggcgttcgataaagcggcggggagcgtcagtaataccggcaatacctggtttaagctgctgataaaaccgggatgcgacaccacggaagaggaaggtgacgcctggtatctgcgccccggcgatgtcgttcgccagccgtcgctgcgtaagcccggcaaccactacattatctataacgagaaatttattaaaatcagcaatgactgcccggtgaaatagccgggcaatcgtctgaattattcctcgttcagcaactcactcaccagcgcgatatgggtcttaatgccgaccgccagcgcatcttcgtcgatgcgaaaatgcgggttgtgcacgttccacgtcgcccctttttgcgcattgccgcagccgataaacaggaaggttcctgggattttctcctgataggaggagaaatcctcgctgccgaatagcgccttatcctgcagctgtagcgtgcctgccgggaaatggcgggctatagcttcacgggcgatatgattggtggcgtcgtggttgtttcccaccgcatagccctgctgccatttgatttcgtagctggcgccgtgggcggcggtgatgccgtcgataatccgcgccatcagcggcggcaccgcctcgcgtacctgctggttatgggtacgcagcgtcccggccagacgcgcgctgtcggggatcacgttatagctatcgccggcctgaaaagtggcgatagtcagcaccggcgcgttgcccggatcgatatggcgggcgacgatctgctgcagcgcgccgaccacttccgcgccgatggtcaccggatcgatacagtgctgcggcatcgagccgtggccgcctttgccgcgaatggtgatatcaaagttatcgctggaagcgacgtacactccctctttcagggtaatcacgccaaccgggctggtggggaaaacatgcaggccgaaaatatgttcgacatcgtcaaccacgccaagctcaaccagctcacgcgccccgcccggcggcacctcttccgcgggctggaagatgaatttaatgctgccgtgcagctgttcgcgaagctggcacaagactttcgccgcccccatcagcatcgcggtatgcgcgtcgtgaccgcaggcgtgcattacgccgggcttcgttgagcagaatgcttctccgctctcttcctggagcggtagggcatcgatatcggcccgcagcgcccacatgggcccaggatgcgcgcctcgcagtacggcaatcacgctattttccagcgggcggcttatctcgaggccggaaaatcgcgccagctcgcgggcgatgtaatcggcggtcggcttctcgttaaacgacagatccggatgggcgtggatatggcgacgccagcgcagcgcttcctcggccgcggcggaaattaattgttcagtggcgtggtgcatcagtgactccttcaatcaataacgggctgactgacgacggttttacgtttcatgagcggcagcaccgccagcgcggagcaaaccatcgccagtgaaagaaacaggaaagcgctggcgtaaccgtgggttttctccaccagatagccaatgacgatcggcgagacaaagccgccgagagtaccgccggtattaatcagaccgatggccgagcccatcatattttccggcaggcgcttcatcggcagggtaaaggcggtgacgaaggtcgacatcaggaaaatttcgccgataaacagcagcaggctggcggtcagcggcgtccgggcatggaagatagcgaagatcgccacggcgctgattagcgcgctaatcgcgatgaccagcggttcgcgattgagaaaatatttacccaccagccagccggtacccagcgatgagatccagatccccagaccgcccgcggccaccacgtagccggatgcagacagcgacatccccatactctgaacaaaaaacttcggtagccaggccatcaggccatagctgggaatattgacgcaaaagatagccagaaagagcaggattaccgtggggttacgccacagggcggcgcccgcggcgctctgtttcgcgaccaccgccgtcggttgccggcgcggcacgcgcagggcgatcagcagggcgatggcgcaggccacgatccccagtacggtgaacgacagatgccagccgagcagcgccagcgcgttaacggcgataatcggcccaatggtcatcgccagtcccgctgacgacagcaatatcgattgggcgaaggtacgttgttccagagtgaagttgcttaccaccgccttggcgcaggagcagggatagcctgaatggccgacgcctgacagaaagcggaacagcagcagcaggccgaagctcgctcccagcaggccaaagcacagcgcgaatatccccagcgccgccagcgacagcaccagcatcgttttgtagccaatgcgatcgttaagccagcccgccggcacctgaaacagcgaataggcgagaaaaaagatgccggtaatgtagcccagttgttcggcgttgagcccgaactccttttcgataggcagcagcgcgaagccggtgacggttttgtcgatataaacgaccacgtagccgataaacagtaagaagatcatctgagactgacttttcatttttttccgcccggtgtctcatggttgcatgtgttgtcgtgggggaatcccctactgcatcctcaggctttacccgcgcggcgggaagatataatttttctataggtgatgcttttttctgataggggtgagcggtgaaatatcttcccaaattaaaccagctgcaggcgctacggcaggtggcgcgtagcggcagcatccgctcggcggcgcgtgaactggggcaatcgcagccggcgctgagccggacattacgtgagctggagcaaatcctcggtacgcaactttttctgcgcagtaaagaaggcgtcgccctgaccgaagcgggaatcgctttcttacagcgcgcggagtgggtgctggaggagctgcggcgcgcggcggatgaggtggaacagattaaccatgtcacccacggtcggctgacggtcggcttttcgtcgttgattgccctgacggtatttcctcaagtggccgaagggtttaagcaggcgctgccgcaggtgcagatgacggtgaaagaggggcagctttcgtcgctgctgccgggcgtccgcagcggagagatagacctggcgatcggatcggtcgacccgatgcatccgccggaaggggtgatgctggaaccgctgtttaccgcgccgttctgtgtcatcgcgcgcaaggggcatccgctggcgcacgagagcgatctgctggcgctgcgtaaagcccgctggctgctgccggagtcgccgatgggctactaccagcagttacaaaacgagctgattcacttttatcgccaggtgtcgattaccccgctgcgcaccgactcggtcattgtcggtttgcagatggtactggaatccgattatttgaccatcgtcgcgcgcgccatgaaccagccgctgcagcttggcgaaaagctggtcacgctgccggtatccacgctcccggcggcgcagtattgcgcggtgtggtcgcaaaaatcggcgctcaccgccaatgcccggctgtttctcaatcggctgcgaagcgcctgtcagcgctacgcctggtaaaacgacggctcgccagttggctgagggcgcagcacagtaaatagtaaaccgcaccggtaaagacgaatatcgcaagcgggtagatttgcacccggttattgacctgcccggcgacggtagtgagttcaggcacgttgacgataaacgccagcgaggtgtccttcagcaggccgataaaaatgccgaccagcgacggctggacgttgcgcagcgcctgcggcagcaggattaagcgtagcgtctggccgggagtgaagccctgcgtcagcgccgcttcatgctggccgccgggcagggcgcgcagccccgccagcaccgagtgcatcaccgaggcggcggtgaaccacgccagcgccagggtgaccgttactgcgcccggtagatcgccgccggtcagcatcggcagcagataccacagccagaaaataacgaagatcagcgggataccgcgaatgatttccgcccacaggaacagcagacgacggaccgctccgccgtagcgccaggcggcgcaggccagcagaataccgcccggtagcgccagcgtggtcgcgccgatggccatcagtaaggtgagcgccacgccgccgggttggccttccgccagccgtccccacagcagataatcaaggttgtcggcgatcaccgcgaggttagcgttcatgttgtgcgctccgtggctgacgatatcctggaccgaagcgcgtcagcgccagtcccataacgatacccagcgccagatacagcgcggtgccgacagcaaaggcctccagcgcatgggcgttatagctctcgatttgccgtacctggtaggtgagctcggcaaaaccaataccgctggccagcgaagagagtttcatcaggttcaggtactggccgacaatcggctgccaggcgttggccagcccctgcggcagcagaataaaacgtaattccccccacgggctaaatccctgcgacagcgccgcttcgcgctggccgtggctgacggcgcgcaacccggcggcaatctcttccaccagaaatgccgaggtaaatacgccgagcccccacattgagcagagaaattccggcgtcagccaccagacgtcgcccggtagaatcgaccagctatgggagtcgttgataaaatcgcgcgccgccagcggcagcaggttccaggcggcgaagtaccagaacagcagttggaccaatagcggcgtattgcgaaacagcgatacccacgccgccaccagccagcggcctgggcgtccgccgccgagacgcagggccagcagcagcaccgccagcgcggtggccagcagtatcccggccacgctgacccagacggtagtgagaaaaccggagataatccactgcagcggctgcccgctgagcacgccatgccagtcgagaatcgccatcactcaatgctctcctgatgcagcgggtcgagcaccttctgcagaaaacggcgggtacgcgcatgctgcgggcgggcgaaaaattccgccggcggcgcggtttcgaggatttcgccaccgtcgataaacaccacccgatcggcaatttcgcgggcaaactgcatctcgtgagtgaccaccaccatggtgataccgctgtgggccagggctttcatcacctgcagcacttcgccgatcatctccggatccagcgccgaggttggttcatcaaacaggatgatttgcggcgaggaggcaagggcgcgggcgatggcgacgcgctgctgttggccgccggagagctgagcgggcatctgccgcgctttatccgtgagaccgacctgggtgagtaattccagcgcccgcttttgggcggcatcgtgttgccagccgtgcacgcgctccagcgcgagggtaatattctcctgcgccgtcaggtgagcgtagagattgaactgttgaaaaacgaagccgacccggctgcgcaattggcgcagcgcgctgccggtcaggcggcgggtcggtttgccatcgatgaggatctcgccgccgcttaaggattcaagctggttgatcaggcggatcagcgttgatttacccgatcctgatggcccgaggatcgccaccacttcgccgggattgaccgttaaattaacgccgtttagtacctgatgatcgccgtagcgtttaaccacgtcgcgaaaagtaatactggcctgctgcagatgcgagaaatccgcagccgaagccgcggagcgtgaaaataaggcggaaaacatctgggttatttcgcttctatggtaaaggcgcgcggctgcggagaggcggtgccagggccaaaccaggtgtcgtagattttcgccgcctggccggatttttccagcttaaccagctcgtcgtttaccgctttcagcagcgccggttcgccttttttcacgccgacgccaatctcttctttgctcagcaaatccggcagaattttaaagttggctttatccggcgcgcccgccagcagcccggcgagaatggtgctgtcctgggttatcgcctgcacgttgccgtttcgcagggcggtcagcgccaatggaatatcgtcataggagagcacccgcgactgcgggaagcgctggtgcagcgcctgttcgccggtggtgccttttaccgcgccgatgcgcgctttgctgtagtcatccagtttatccggcgacttagacggaaccaggaactgctggccggttacaaagtagggcgttgagaaatcaattacctgcgcgcgctccggggtaatggtgatatcggcgacgatcaggtcggccttaccggactgcagcagcggaatacggttagccgggttagtggccaccagctcaagcttgacgccaagagatttcgccagcgcctgcgcgaaatcgacgtcgtaacccaccagttgatgggttttcgcatccacggaaccaaacggcgggttagcgtcgaaggtggcgaccttcaccaccccggcggctttgatatcggctaactggtcggcctgaacctgggcggtcagcagcagcgcgcccagcgcaaaagcgattttggtataagttttatgcatcatcattcccctgaatccctgttttgttttgtgtttatcacgctcccacaaaagcgcctcgtccggcaaagaagaaaaaattcttatctataaccaaaatctcttaataaaaatggggatattgctgttaatcaaatcgcttttacaggaaggggttagtcaccgaagcgcagcggcgaatatgcatcttccaggattacaaattcggaattgatatttcccgcccgtcggcgattgtggttgaaataacaacaacgcaaacccgaccgatggaggagaaatgaaagtagcgctgtggcaacggattaccggctggctggcttttttatctaacggagaagccgggcagcaagatggtcaacggatgatggaggcgatcttgccggtcgccagcctgtatggcgtggatctcggcaacgtggaaacccggtggtttcgccatgacaaaacatactgagcggcgctggacgcgcgaagcctactggaacgaggtgtgctctgtgtagccgaaggctgcttgcggttgcggtaaaaaggagaggctccgcagcccaagcagctttaaacccatgctcctactcctgttcgccctgttttttcccatccccgttttgcaatttccccgccgtcacggtataaatgaccttcatttggatgtttagacgtccatacataaagaaggcaatatgcaaacaacatcacaacaacaaggtgggcaacttaagcgcaccatgaaaacgcgccacctgattatgctctcgctgggcggcgtcattggcacagggttattcttcaataccggctatattatctcgaccaccggcgcggcgggcacgctactggcgtatctgatcggcgcgctggtggtctggctggtgatgcagtgtcttggcgaactgtcggtggcgatgccggaaaccggcgcctttcacgtgtatgccgcgcgttatctcggcccggcgaccggctataccgtggcgtggctctactggctgacctggaccgtggcgctcggctcgagctttaccgccgccggattctgtatgcagtactggttcccgcaggtgccggtgtgggtctggtgcgtgattttctgcgcggtgattttcgccctgaatgttatctctacccgcttctttgccgaaggcgaattttggttctcgctggtcaaagtgatcaccatcattgcttttattattctcggcggcgcggccatcttcggctttattccgctgaccgacggttcaccggcgccggggctgcataacatcaccgccgaaggctggttccctcatggcggcctgccgatcctgatgaccatggtggcggtgaacttcgctttctcgggcaccgaacttatcggcatcgccgccggcgagacgcaaaacccgcatcaggtgattccggtcgcaatccgcaccactattgcccggctgattattttctttattggcaccgttttcgtgctcgcggcgctgatcccgatgcagcaggcggggggggaaaaaagcccgttcgtactggtgtttgaaaaggtcggcattccttatgcggcggatatttttaactttgtgatcctgaccgcgattttgtcggcggccaactccggcctgtatgcctccggacggatgctgtggtcgctatcaaatgagaagacgttgccagcctgctttgccaaagtgaataaacgcggcgtgccgctaaccgcgctgtcggtaagcatgctgggcggcgtgctggcgctgttttccagcgtagtcgcgccggatacggtgtttgtcgcgctgtcggcgatttccggttttgcggtggtcgcggtatggctgagcatctgcgcgtcgcattttgtcttccgccgccgccatctgcaacagggcaaagcgttaagcgagctgcactatcgcgcgccgtggtatccgctggtgccggtgctggggtttgtcctctgcctggtggcctgcgtggggctggcctttgacccaagccagagtattgcgctgtggtgcgggatcccgttcgtcgcgctgtgttatggtgcttactatctgactcgtacacggaaattaactcaggagccgcaacatgccgcagaataatccgctaaccgcaatccttgaaacgcaaccgttcgtgctgctggatggcgcgatggcgacggagctggaagcgcgcggctgcaatctggccgatagtttatggtcggcgaaggtactgctggagaatccgcagctgatccgcgatgtgcatctcgactatttccgcgctggcgcacaggtggcgatcaccgccagctatcaggcaacgccggcaggctttgccgcccgcgggctggatgaggcgcagtcgaaggcgctgataggtaaaagcgtcgagctggcgcgtaaagcccgcgaggcgtatctggcggaaaacccgcaggcgggaacgttgctggtggccgggtcggtcgggccgtatggcgcgtatctggcggatggctctgagtatcgcggcgattatcagcgcagcgcggaggcgtttcaggcgttccaccgcccgcgcgtcgaagcgctgctggatgccggggcggacctgttggcctgtgaaacgctaccgtcgtttgccgaaatcacggccctggcggcgctgctgcgtgactacccgcgcgcccgcgcctggttctcgttgaccctgcgcgacgccgaacatctcagtgacggcacgccgctgcgcgaggttgttgcggtattggccgataatccccaggtgctggcgctggggattaactgtatcgcgctggaaaataccaccgccgcgctgcagcatctgcacagcctgacgtcgctgccgctggtggtctatcctaactccggcgagcactatgatgcgctgaccaagacctggcatcatcacggtgaagcctgcgcgacgcttgcggcctatttgccgcagtggctggcggctggcgccaggctgattggcggctgttgtcgcaccacgccgcaggatatcgccgcgctggcggcgggccgctaacacctgtatttctttccccccggatggcggcgctccgcgcctgatccgggctaccagtaccgcgagccggggaacccatttctttaatccctgtttttaactatctaatcccgcttttcttctaaaaacgattcgctattaggcagaatttttaattacttcatctccacgctgatgccggaaatactgcacccataacaactaaggggaagcagacactatggcattcacatcgcgaattactcttctggcggcgctggctttcgctgccttccaggcgcaggcggttaacgtcaccgtcgcctatcaaacctccgctgaaccggcgaaagtcgcccaggcggataacaccttcgccaaagccagcggcgccaccgttgactggcgtaaattcgacagcggctccagcatcgtacgcgcgctggcctcaggcgatgtgcaaatcggcaacctcggctccagcccgctggcggtggccgccactcagcaggtaccgattgaagtgttcctgctggcctcaaagcttggtaattccgaagcgctggtagtgaagaaagatatcactaagccggaagatctgattggcaagcgcattgcggtaccgtttatttcgaccacccactacagcctgctttccgcgctgaaacattggggaatcaaaccgggccaggtgcagattatcaacctgcagccgccggcgattattgccgcctggcagcgcggcgatatcgatggcgcttacgtgtgggcgccagccgttaacgaactggaaaaagagggcaaggtgctgaccgactccgcgcaggtggggcaatggggcgcgccgacgctggatgtctgggtcgtacgtaaagactttgccgagcagcatccggaaatcgtgaaagctttcgctaaaagcgccatcgacgcgcagcagccctatatcgccaacccggaggcgtggctgaagcagccggaaaatctcagcaagctgtcgcgactgagcggcgtgccggaggcggatgtgccggtgttagtcaaaggcaatacctatcttaccgccgcccagcaggcgcaggagcttaacggcccggtgaaccaggcgattatcgataccgcgaaattcctcaaagagcagggcaaagtgccggccgcaggaaccgattatagccagttcgttaccgaccgtttcgtgaaataaaaggaggctctgatgctgcaaatctcgcatctttccgctgattatggcggtaaaccagcgctggcggatatcaacctgacgttggacagcggcgaactgctggtggtgctgggcccctccggctgcggcaaaaccacactgctgaacctgattgccggattcgtgccttaccagcacggcagcatcactctcgaaggccgtcgcatcgacgggccgggcgccgatcgcggcgtggtgtttcaaaatgaaggtctgctgccgtggcgcaacgtgctggataatgtcgcgctgggactacagctggcgggggtggaaaagacccgacgccgggaaatcgccgcgcagatgttaaaaaaagtcggcctgcagggggcggaaaaacgctttatctggcagctgtccggcggccagcgtcagcgtgtcggtattgcgcgcgcgctggcggcggatccgcagcttctgctgctggatgagcccttcggcgcgctggatgcctttactcgcgagcagatgcaaaccctgctgctgcgcctgtggcatgaaaccggcaagcaggtgctgttgattacccacgatatcgaagaagcggtatttatggccagcgagctggtgctgctgtcgccggggccggggcgggtgcaggaacgcctgccgctggagtttggccgccgttttgtcgccggtgaatcctgccgcagcattaaatcggatccgcaatttatcgcccagcgcgaatatgtgcttagcagggtgttcgaacaacgggaggctttctcatgagcgtggtccttaatgataaaccgcgccagcgcgcgctgaaatggcgctggccgctttcacggcagctgacccttagcgtagcgacgctggcagtattgctggctatctggtgggcggtgaccgcgttgcagctgattagcccgttgtttttaccctcgccgtggcaggtattgcagaagctactgaccattgccgggccgcaaggctttatggacgcgaccctgtggcagcatctggcggcgagcctgacgcgtatcgccatcgcgctggtactggcggcgatcgttggcgtgccggtggggatcgccatgggattgagtccaacggtacgcgggatcctcgacccgctgatcgaactgtatcgtccggtaccgccgctggcgtggctgccgctggtgatcatctggttcggcattggcgaaacgccgaaaatcttactgatctatctggctattttcgctccggtagtgatgtcgacgctggcgggtgttaaaagcgtgcagcaggtccgcgttcgcgccgcacagtctttaggggccagtcgcgctcaggtgctgtggctggtgatcctgccgggcgcgctgccggaaattctcaccggcctgcgcattggccttggcgtcggttggtcgacgctggtggcggcggagttgattgccgccactcgcggcttaggttttatggtgcaatccgccggtgaattcctggcgaccgatgtggtgttagccgggatcgcggtgattgcgataatcgcatttgttctggaactgggactgcgcgcgttgcagcgccgcctgacgccctggcatggagaagtacaatgagtgaacgtctgagcattaccccgttggggccgtatattggcgcgcaggtggccggagccgatttgacccgtccgttaagcgacaatcagtttgagcagctataccacgcggtgctgcgccatcaggtggtgttcctgcgcgagcaaaatatcaccccgcaacagcagcgcgatctggcgttacgttttggcgatttgcatatccatccggtctatccgcatgcgccgggcgtggatgaaattatcgtgctggatacccataacgataatccgccggacaacgataactggcataccgacgtgacctttatcgatacgccgccggcgggggcgattctggcggcgaaggagttaccttctaccggcggcgataccctgtggaccagcggtattgccgcctgggaagcgttatccgaaccgttccgccagctgttgagcgggttacgcgcggagcacgatttccgcaaatcgttccaggagtacaagtacaacaagacgcaagcggagcatcagcgctggcgcgaggcggtggcgaagaacccgccgctgttgcacccggtggtacgtacccatccggtaaccggtaagcaggcgctgttcgtcaatgaagggtttaccacccgtattgtggatgtcagcgagaaagagagcgaggcgctgctgaatttcctgtttgctcacgtcacaaaaccggaattccaggtgcgctggcgctggcagccgaacgatgtggcgatttgggataaccgggtgacgcagcattacgccaacgccgactatctgccgcagcggcgcatcatgcaccgcgcgacaattcttggcgataagccgttctaccgggcgggataaacggctagagatgcgcgccgatgtagcgctggtagcggttggctttcaggtaggttaaatccaccagcaccagcccatcgacgcagtgattaaagtccgggtcgctgccgaaatcgataaactgcacgcctcccggctcgcacacttccgagtactgtttatacagcggcgggatgccgcagccgaggttgccgagcagggacttcagtcgcgtcaggtcttcggtgtaatcctcgccgccaaactgcgccagcacctcgggtagcgaagctgggtaggggcgacgggatttggccagcggatgcgtcgccggaaaccataagcggtagaaggcgaccagcaaatcgcgggcatcgggcggcagtccgcctgaaattgagaccgggccaaaaagatagcgatagtgcgggtttcgcgccagccaggcgccgatgcctgaccagagataatccagcccgcggcgcccccagtagcgcggctgaatgaagctgcgccccagttcaatcccgtgctgcagaatatcgtccatccgtgcgtcgtagtggaacaggctgtagctgtagatgccctccagtcctcgtttctccagttgcatggcggtaggcataaaacgataggcgccgacgatctccagatcctcttcatcccataaaatcaggtgcagatagtcatcatcgtagctatcgatatcgcggcgtttgccgctgccttcgccgaccgcccggaaagcgatctcccgcagacggcccagttcgcgtagcagcggcgcctcttcctggccgttgcgctgccacagataaatcagcttaccgtctgcggttttgcccagacattcggtttttgccagctcgcgtttgagcagcgcgcggtcttccgggcgggcgatcgcgctttcgcttttaaacaggccggggtgtcctttaccgaggcgctcgacgtggcggtagcagcggtccgccagttcgcgggcggaaagcggcggctgatgccacgatgaccacgcgatttgctggccaatgcgtaacggcaagctgctatcgcggcggcgaaacatctgctgcattaacagcagcagcggcagattctcggagagcagggcgctggcgtagaacagcgggctgttgtgggcgcggatccacgccggcagcagaggcgcgcggtatttcgccgccagcttgatgaagccgggatgccattttttatcacggatgccgcggcgggtcagacgcgaaacttcccccgccgggaagaagatcagcacgccgccctgctgaagctgttggtccatctgctgcagcgccgctttggcggtacggccgttgatattatccaccggaataaacagcgagctcagcggttcaagatgggtcagcatgcggttagtgacgactttgacatcgcgccgcacgcgggagaccgcatagagcagagcgagaccatcgagcgtgccggtcggatggttggcgataatcaccagcgggccatgttcggggatttgttcgaggtcatgcctcggcccgacccgaagcctgcagggataagtcgaaggtaccacgaagtggcgattttggcggccagagcccgggggtggccgggacagcccgcatggatgcgggctgagggccgtgttttgcacggacgctgcctcggcccgacccgaagcctgtagggataagtcgaaggaaccacgaagtggcgattttggcggccagagcccggggggacaaggggcggcggcgactggccgccccctgtgcgctccctgcgccaggaaagccataacgcagaagaaatatcgggagcgcaatgtgctctgaattaacacaaaacacgtgtttttcccggaccaaaaaagtcgcaaaccgataacagtatctattcagccttacccgaaccgcgtttttccattcgatagttggtgaacctctctccacgcgattctactcgctgctcagcgacgacacgaaatccctgacgaagaaaactggatcgtgccgttatgctcgcatcaaccgacaatatctttcccggaaggctggcgcagacccccccgatgagcgcatgaccgattccacgacgggtataatccggcgagacgaaaaagaggtcgatataatcattatcgacagtgataaatccaaccggctgattatcaataaccgccaccagcacttgcgaatgcgcaaatttctgccgccagcgggattcatcaacctgcgcccaggcggcaatttgcgcgggagaataatcccggctggcggtctctttaaccgcacgcaaaaaaatggcgcacagcgccggaaaatcctcttctacatacgccctgatcgttaacatcgttatagtccaagtaccagttgtcgttcgagctgtgggtcgagcagagttacgtgtaaccccaccagccgcacgccgcggctgccccgacgctcaagccaggcgttacgcgcggtcgcgattaaatcctctttgtttaaccgcggccagacgtgctcctgagtagtgagctggaaatcgttaaacttcagtttgatgccctgacgcgcgatcagtagatccggttttaccttcgccagacggcgttccagctcgggatagagattttcgataatcgcttcgcagtctgaccactcatgaatatcttccgccagagtgcgctcgacgccgaccgatttacgctgacgatcgttatggatttcgcgctcgtcaatgccgtggctgcgctcccacaggatacggccaaacttaccaaaacgtttaagcagcatcgccagatcgctgttttgcacgtcgccacaggtacgcagccccatattttccagcttcgccgccgacaccttcccgacgccgggaattttcgccagcggcagagaccgcacaaactccgccacctgatgcggggcaatgacgaactggccattcggcttgttcatatctgaggcaattttcgcgaggaattttaccggcgccacgcccgcagaagcggtgagattcagttcacgctcgatggtctggcggatctcctgggccatcagcgtggcagagccgtggcagtgtacgctgtcgctcacgtcaaggtaggcttcatccagcgacagcggctcgattaacgaggtatagcgggagaaaatttcgcggatgtggttcgaggcttctttgtaggcatcaaagcgccccggcagcagcgtgaggtgcggacacagtttaagcgccgtcgccgtcggcatcgcgctgcgcacgccaaacttacgcgcaggatagttcgcggtactaatcacgccacgttgtacccgactgccgccgattgcaatggggatatcgcgcaacgccgggttgtcacgcatttccaccgctgcgaagaagcagtccatatcgacatggataattttacgcatcgccttgcccaacactgtatacccatacagcatagcaaaactacacgcaaattttattctttttttaattcaaccgccaaaaaagctgttacaacataaaagtgaaacaaataacctttattttcatacatttaaataatgaatcaggaagatacaatcatgaagaaaatactcacggtactctgtctgctggcgaccggcagcgttttcgccaatccgcagctgattgcccaccgcggcggtaccggcgatgcgccggaaaacaccctaccggccatcaaactggcgctggaaaatcacgcacaggccatctggattacggtacagctaagccgcgatggcgtaccggtgctctatcgctcaagcgatctctccgccctgaccaacgccgagggcaaggtctcaagcttaaccgccgccgagctggcaaaagtcgatgccggctggaaatggggcgatgacagccatccgtggcgcggcaagcaggccacgatcccgaccttacaaagcgtgctgcagcagtggccgcagaccttcttctacatcgatataaaatcaccggatgccgaaccggcggtgatgggcgaacgcctgctggaggtgttaaaaaatacccatagcctcgaccgggtacgggtttattccaccgaagaccgctatatcgccgctctgccgcaaccgatcccccgctttgttagccgcagcgaaacccgaaccaggcttgcaaacgtttcgctcagccaccagtgccagcaagacagccagcgcgatggcgataagtggtacgggctggaactaaagcgcaaggtggaggtagtcgagaagtttacccttggtgaaggcgtttctccggcgacgctcacctgggataaagaggcgatggattgcttccgctcgcagggccaggcccacatcattttcttcggcatcaatagcgcggaagattatcgaacggcgaaagaattaggcgccgacggcgtgatggtggattctccggcgcaggcgaaaaactggcagtaagataaaaaaggccgcgaaagcggcctgaaaaacgcaagcgtagcgccgtcggcgcattagagaatgcgctgctgctggcgctgcgcctcgcgggcgagacgtttcttacgcgcatcgcacggttccggacagtcgcagactttctccagccccagcgaggagatcccgccgcaactgccttgaatactcttacgcttcaccaggtagcccagggacatgccgaggatcaccagcgcaaaaatcacaaaggtcgcgacaaataccgtccacatcatcagcctccaaagtcgtcgagcatgatgttctcatcttcgacgcccagatctttgagcattttaatcaccgcggcgttcatcaccggcggcccgcacatatagaactcgcaatcttccggcgccggatggtcgcgcagatagttttcatacagaacattatggataaagcccgtatgcccggtccagttatcttccggcagcggatcggagagcgcgacgtggaaggtaaaattggggttttcgcgcgccagctgttcaaactcatcgtcatagaacatttcgcgcagcgaacgcgcgccgtaccagaagctgattttacgcgtgctgtgcaggcgcttaagctggtcaaagatgtgtgaacgcatcggcgccatgcccgctccgccgccgataaacaccatctcggcgtcggtctctttggcaaagaactcgccaaacggcccggaaatcgtcaccttatcgccaggcttcagcgaccagatataggacgacataatccccggcggcgcatccggaaccttcggcggcggcgtggcgatacgcacgttgagcataatgatgccctcctcttctgggtagttagccatcgagtaggcgcgcagggtcggctctttcacctcagaaacatagcggaacaggttgaacttgtcccagtctgagcgatattcatcgggaatatcaaagtcggcataggccactttatgcgacgggcattcgatctgaatataaccgccggcgcggaacggcaccgcttcaccatccggcacccgtaatttgagctctttaatgaaggtcgctttgttatcattagagataacctcgcactcccattttttcacgccgaaaatctcttccggcagctcaattttcatattctgcttcaccgccacctggcaggccaggcggcacccttctttggcttcgcgtttggtgatatgcgaaagctctgtcggcagaatatcgccgccgccttctttgatggtcacccggcactggccgcaggagccgccgccgccgcaggcggaagagacgaagataccgttgctggagagcgtgttcagcagtttgtcgcccgccggcgtgcggatctgtttatccgcttcgttattgatttcaataaccacgtcgcccgcgttcaccagcttcgagcgcgccaccaggataagccccgacaggaccagcacgatcagcgtgaacatcaccacgccaagaataatttccatacttttccgcccttatagctgcacaccggagaatgacataaagcccagcgccatcagtccggtggtgataaaggtgatccctaacccgcgcagaccggcgggcacgttggcgtacttcattttttcgcggattcccgccatcgcgacaatcgccagcatccagccgatgccggaaccaaagccgtaaacaatcgattccgggaagttgtaatcgcgctgcaccataaacgacacgccgccgaaaatagcgcagttaacggcgataagcggcaggaagatccctaacgcgttatagagtgccgggaagtacttatcgaggatcatctcaagtatttgcaccagcgccgcaatcaccccgataaaggtgatgaagttaaggaagctgaggtctacgccttccatcaatgcgccgtcgcgcagcaccaggttatagaccaggttgttgatcggtacggcaagacccagcaccaccgtgaccgcaacgccgaggccaaacgcggtggaaacctttttcgacaccgcgaggaaggtacacatcccgaggaagaaggccagcgccatgttctcaacaaacaccgcgcggacaaacaggctaatgtaatgagccatgatcggttactccttttcctgctgttcaggcttccagctacgcagggcccaaatcagcaaaccgataatgaagaacgcgctcggcgccagcaggaacaggccgttcggctgataccagccgccgttctgcaccgtttccagtacggtgataccgaacagcttaccgctgccgataagctcgcgcaggaaaccgacgataatcaggatcgcgccgtaaccgagaccgttaccgataccatccataaagctggccagcggcggcgatttcatggcataagcttcggcacgccccatcacgatacagttcgtgatgataagcccgacgaacaccgacagctgcttagaggtctcataggcgaaagcccgcagcagctgatccaccacgataaccaacgaggcgatgatcgccatctgcacgatgatgcgcacgctattgggaatatggtggcgaatcatagagataaacatgctggaaaacgccgtcaccagcgtcaccgcaatggtcatcacgaaggcggtttccagtttggtggtcaccgccagcgcggagcagacgccgagcacctgcagggcgatggggttattggcgataagcggccccaccagcacgcgcttcacctctttcatatcgctctgttcagccattattcagctctccctcacgaacctttttcaggaacggaccaaagcccagttcgcccatccagaaatcaaagctatgctgcacgccgtttgacgtcagcgtggcgccggataaaccgtcaaccgcgtggagatcgcctgcgcgcgcgccgccttttaccaccttcaacgacggcatgccgttgtcatccagcacctgcttaccgacaaactgctgacgccagttcgggttctccacctcgccgcccaaccccggcgtttcgccctgatcgtagtaagtaatgcctttcaccgtacgcccatcgacgtccagcgccacgaaggcgtacatcattgaccacaggccattgccatagataggcagcacgacttcctgaatctgctgctgcgcgtcacgcaccaggtaaatttccgccaggttgctgcggcgtttaatcccggccggatcctggttggcgtcgagcgcgatgctctgctgcggatctttcagcgcctgagcctgattaaatttgcccgggtctttatccagcagttcgccggtcgccagattgaccagccgaggggtaatgcgcgcggcgaaggtttccgccaccgcgtcagcatccatcccctgctgcatcaggccggcgaccgccaggatattgcgctgtttatccagcgcgcgttgttcctgctgacgtgacttgaggcccacggcggaaccagcaaccacaatggagcacaccagacaaagcaccagcaccaccagcagcgttttgccgatgctatcgttacttttcttatcagccacgcgacttcctccgcttgatattggcctgcaccaccaggtaatcgaacagcggcgcaaagaggttggcgaacagaatcgccagcatcatcccttccggataggccgggttgacgacgcgaatcagcacgcacatcacgccaatcagcaggccgtagctccatttacctttatcggtaaaggaagccgataccgggtcagtcgccataaacatcatgccgaaggcgaaaccgccgagcaccagatgccagtaccacggcatcgagaacatggggttggtatcagaaccgatgaaattaaacagcgtagcggtagcgatcataccgaccatcaccccggcgacgatgcgccaggaagcgatacgggcaaagataatgaacgcgccgccgatgaggatcatcagcgtcgacacttcgccaatcgagccgggaatgttgccgaggaaggcgtccatccagctcaccgggatgccggtggcgacgttaaccagcgcttcaccgccgccgctggcccactgggagagcggcgtcgcgccggaaaaaccgtccgccgccgtccataccaggtcgccagaaatctgcgccgggtaggcaaagaacagaaacgcgcgccccgccagcgccgggttgaggaaattgcgcccggtgccgccgaaaatttctttggcaatcaccacgccgaaggagattcccagcgccgcctgccatagcggcatcgttggcggcacaatcagcgcgaagagaatcgaggtaacgaaaaagccttcgttgatctcatgtttgcgcacaatcgcgaacagcacttcccaaaaaccgccgacgatgaatacggtcaggtagataggcaggaaaaataccgcccccagcgtcatcatgctgagccacccggcatcggcgctgaagctcacccctaaccactgggcaacgctatagtgccagttgttggctattacctgctgtaaatgttcggcgccgtatagcttgtgcagcgccggaatcgtctgcaagccgacgttatacatgccccagaacatcgccgggaacaccgcaaaccagacgaggatcatcatccgcttgaggtcgatggcgtcacgtacgtgcgccgcgccgcgggtgactaaacccggggtgtagaagatcgtcgccgccgcttcatacagcgggtaatattttgctaacttgccgccgtgcgtgaaatgcggctcaagtttctcaatcaggtgctttaagcccatctcttatccttcctgctcaatctgggttaacacgctgcgcagcgccgggccgtattcatatttgcccggacaaacgtaggtgcaaagcgccagatcttcttcatccagctccagacagcccagcgcctgggcgctatcgctatcgccggcaagcagatcgcgcagcaatatggtcggcagaatatccagcggcattacccgctcatagttgccgatcggtaccatcgcccgctcgccgccgttagtatcagtggaaaaattaaagcgcttgcgcttaaagaaatgaccaagggtggtgcgggtaatcgagaacttctctttgcccggcatcacccagccaaacagctctttttcacggccttctcgtaccacactgacctgcaaatggtagcgcccgaggaaggcgtgagggccgcaggcgtgggtgccgctcaagacagaaccggaaataacccggttttcatcatccaccagctcgcccgccagcagctcatcgaggctggcgccgagacaggtttccagcaatcgcggctgttttacctgcgggccgccaagggcaatgacgcgttcgctgtacagctcgccgtcgaggaacagtctgccgatggcgatgacctcctgatagttgagatgccagacctgtttggtcaggctgaccggctcaaggaagtgaatgtgcgtaccggcaagccctgccggatgcgggccactaaactggttgaatgtcacctgcccggcgggatggccgcccagcttgccgccgctggcctgacagacgtggactttaccgtccgtcaggtgcgttagcaccgtcagaccagcatcaaaggcttcacgctgggcgaggataatcggctgcggttcagccgccagcgggttggtatcgatagcagtgacgaaaatagccgccggaacgctacccggcgcgggaattttgctgaaaggacgggtacgaaacgccgtccactgcccggattccagcagctgttgctgcaccgcttcccgtggcaaatcgttaagatcttctaatgcgtagcgggtaaacgacaccgcctcattgctgccgtcgatatcaatcaccaccgattgcagcacccggcgctcgccgcgatgaatggcgctgaccaccccactggctggcgcggtaaaacgtaccccggcgttctttttatcttcgaacagcacctggcctttttgcacccgatcgccttcgctcacggccatcgaggggcgcatgccgacgtactcctcgccgagcagcgcgacgcgtttcaccgcaggccggggcgagatctgctgtaatggcatgccagctatgggcaaatccagccctttcgtgattttaatcatatcgttagcaggtatccgtaacctaaaccccggctcaagccgaggccagcattattgatggaatatcagaataagaaaggaatagcggtgccacgggggcacaagacgggagagaagcatcctttcttaccctggtcataaacggcgggagtgtaacattttgtgagtggcagaagtaggaaaagcgccaataagtgcttctaaaatgcgagctattgcgcaaagttctcactgcgctttgcggcaatattcgctataaaggaacattaaattgtaaacgcagccacaccgtgcttgcgaaaaactgccgtgatgctaatgtgagcgctctaaatccagaaaactctgatttcgggtatctcttgccgtcctggcatgtggttttttgttttatcaaggaacaagcagtatgcgcaaaatcgcattctttattgcgatgcttctgttgccgtgcgtgtcatttgctgggttactcagcagtagcagcccgacaacgccggttagcaaagaatataaacagcagttaatgggctctcccgtttatatcgagatcttcaaagaagagcggatgctcgatctctacgtcaaaatgggcgaaacctaccagcttctcgatagctaccggatctgtaactactccggcggcctcgggccgaagcaacgccagggcgatttcaaaagtccggaaggattttataacgtctcgcgcagtcagctaaaaccagacagccgcttttataaagcgatcaatatcggcttcccgaatgcctacgatcgcgcgcacggctatgaaggtaaatacctgatgatccacggcgcctgcgtttccgtcggctgctacgcgatgaccgataccggcattgacgagatcttccagtttgtcaccggcgcgctggtatttggccagccaagcgtgcaggtcagcatctacccgttccgcatgaccgacgccaacatggcgcgacataagttctcgtactatgcggatttctggaagcagctgaagccaggctatgactacttccagcagacccacaaaccgccggtggtttcggtgatggatggccgctatatcgtcagcaagccgctcagccacgaggttatccagccgcagctggcctcaaactatacgctccccgaggcaaaataacgcccactcgcctggcatgattttattccaggcctcattgccggtcagcggctgagtggcgataacggagaccacatcgtttggtgtggtctcacgttgaaaatcaatttccacatcctgatccagtagcttcgccacgccaaacggcgcccgacgggtgatccagtacaggttggttgaacagtacgccatcacatagcgcccgtccgataacagcatattaaacacgcccttctcgcgcatttcgcccgccagcgtcgcgatgtatttaaacacgccgaccatattgccaggcgtgcgcggatagcgctcggttaaacggtgcaacagccagcagaaagccgtttcgctgtcggtctcgcccaccgggcggaaatttcccgtcttcagcgatttataacccttgagctgcccgttatgggcgtaggtccagtggcggccccacagttcgcgggtgaacggatgggtgttctccagcgccacttcgccacggttggcctgacggatatgggcaatgacggaacaggatttaatgggataatcctgtaccagtttggctattggcgactgaaagctcggctgcggatctttaaatgtgcgacaccctttcccttcgtaaaaggtaataccccagccgtctttatgcggcccggtgccgcccccgcgctgaaccagcccggagaagctaaaacagatatcggtcggcacattggcgctcatcccgagcaattcgcacatagatcacctcataccactgcacaaaatatcctgccgctaaagccttgtcgccgcggctcctcaacatggaagccacggcgccgtcatcatggcaagttaagctttaaccatctctttttcgatcaacataatcagaatatgaatcaccttaatgtgaatctcctgaatgcgatcggcgtaaccgaaatgcggtacgcgaatttccacatcggcggaacccgccattttgccgccgtctttaccggtcagggtgatcactttcattccctgcgcgcgcgcggcttcaatcgctttgatcacgttgccggagttgccggaggtggaaatgcccagcagaacatcgcctgcgcggccaaccgactcaacatagcgggagaagacatattcatagccaaaatcattactcacgcaggacagatggctgacgtcagaaatagcgatcgccggataaccagggcggttctcgcgataacgcccggtcagctcttccgcaaaatgcatcgcatcgcaatgagaaccgccgttgccgcaggaaagcactttaccgccagctttgaagctatccgccagcagtaccgccgcgcgctgaatagcgtgaatgttggcctcgtcctgcagaaagttggccagcgtttccgcggcttcgttcagttcgttacgaataagatcctggtacatgaggataatccttcagtattggttggaataaccctggcagtgtaccggatagccgccgaagcgagaagcagcaggcaacgttatccctcgtccttttgattttacgtgccgcttttccagccaacaatgtgagcaaggttgtaattattttgtaaacacattgctaaaacaaattacatccactacaaccaatacatcacaagtggtcagacctcctacaagataagggagcatttctctatgatgattttgagtattgttgcaaccgtagtgttactcggcgtgctcttctatcaccgagtcagcctgcttctcagcagcgtgattttgctcgcctggaccgcggcgctcagcgtggcggggctgtggaatatctggctgctgttgccgctggcgattatcctgctgccgttcaactttgcgccgatgcgtaaatcccttttctccgccccggcattccgcgccttccgcaaagtaatgccgccgatgtcgcgtacggaaaaagaggccatcgatgccggcaccacctggtgggaaggcgatctgttccgcggcaacccggactggcacaagctgcataactatccgcagccgcgcctcaccgccgaagagcaggctttcatcgacggcccagtagaagaagcctgccgcatggcgaacgacttcgaaattacccatgaaatggctgatctgccgccggagctgtgggcgtacctgaaagagcatcgcttctttgcgatgatcattaagaaagagtacggcggcctggagttttccgcctatgcccagtctcgcgtactgcaaaagctgtccggcgtttccgggatcctggcgatcaccgtcggcgtgcctaactccttagggccgggcgaactgctgcaacattacggtaccgaagagcagaaaaatcactacctgccgcgcctggcgcgtggtcaggagatcccatgcttcgcgttgaccagcccggaagcgggctccgacgccggcgcgatcccggataccggcgtagtctgtatgggcgactggcagggtcagcaggtgctggggatgcgcctgacctggaacaagcgctatatcaccctcgcgccaatcgccaccgtactgggcctggctttcaaactctcagacccggaccgtctgctgggcggcgaggaagaactcggtatcacctgcgcgctgatccctacctcaacgccgggcgtggaaattggccgtcgtcacttcccgctgaacgtaccgttccagaacggccccactcgtggtaaagatattttcgtaccgatcgattacatcatcggcggcccgagcatggccggccaggggtggcgtatgctggttgagtgcctgtccgtgggtcgcggtattactctgccgtccaacgccaccggcggcctgaaatccgtcgctatggcgaccggcgcctacgcccacattcgccgtcagttcaaaatctcgattggtaaaatggaagggatcgaagagccgctggcgcgtatcgcaggcaacgcctacgtaatggacgccgccgcttcgctgattacctacgggattatgcttggcgagaaaccggcggtgctgtcggcgatcgttaaatatcattgtacccaccgcggccagcgttcaatcatagacgctatggatattaccggcggtaaaggcatcatgctgggcgaaggcaacttccttgcccgcgcttatcagggcgcgccgatcgccattaccgttgaaggggcgaatatcctcacccgcagcatgatgatctttggtcagggggcgattcgctgccatccgtatgtactggatgagatggccgccgcgcagaacaatgacgttaacgccttcgataagctgctgtttaaacatatcggccatgtcggtagcaacaaagtacgcagcttctggctgggcctgactcgcggccgcaccagcagcgcgccgacccgtgatactacacgccgctactatcagcacatgaatcgcctgagcgccaacctggccctgctgtcggatgtatcaatggcggtactgggcggcagcctgaagcgtcgcgaacgtatctccgcgcgtctcggcgacgtgctgagccagctgtacctggcatcggcggtgctgaaacgttatgacgatgaaggccgtaatgaagcggatctgccgctggtccattggggcgtgcaggatgcgctgtatcaggcagagcaggctatcgatgacctgctgaagaacttcccgaaccgctttgtcgccggcgcgctgcgtctcgccatcttcccgaccggccgtcactacgatgcgccgtccgacaagctggatcataaagtggcgaaaattctgcaggttccgagcgcgacccgctctcgtatcggtcgcggccagtacctgacgccaagcgaacataacccggttggcctgctggaagaggcgctgctggatgtgatggcggcggacccaatccaccagcgcatctgcaaagagctgggtaaaaatctgccgttcacccgcctggatgagctggccactaatgccctggccaaagggttaattaatcaggaggaagcctcgattctgacccgtgcggaaaccagccgtctgcgcagtattaacgttgatgatttcgcggcggatgaactggcgaccaaaccggtaaagctgccggaaaaaatccgcaagattgaagcggcataataaaagcaatactgcacatcacgacgaaggcggggaatttccccgccttttcttttgttactcccccgccaaagtagcatttttttaacaaaatattccatgccgcctcccgctgctgatatggtattaaaattatctaaacgccctctttataatggagttcaccactgtgcctggcttgaaaattacgctgttgcagcaaccgctggtgtggatggatggtcccgccaacctgcgccatttcgatcgtcagctggaagaagtgagcgggcgcgacatcattgtactgcctgagatgtttactaccggttttgccatggaagcggcgaagcagtcgatgccgcaggaagaggtcgttgagtggatgcaggcgaaagcggagcagaccaacgcgatgattgccggtagcgcggccttgcagaccgaacgtggcccggtgaaccgctttctgctggtagagcccggcggtaaaacgcacttttacgataagcgtcacctgttccgcatggcggatgagcatcaccattatgaggcaggtactgagcgagtggtctttgaatggcgcggctggcggattctgccgctggtgtgttatgacctgcgtttcccggtatggtcgcgtaaccacaacgattacgatctggcgctgtatgttgctaactggcctgccccgcgttcgctgcactggcaatcgctgctggtcgccagagctattgaaaaccaggcctacgtcgccggctgcaaccgcgtcggcaccgatggcaacggccaccactatcggggcgatagccgtatcatcagcccgcagggagagattatcgccaccgccgaaccgcatcaggcgacgcggctcgatgccgatctgtcgttggccgcgctgcaggagtatcgcgagaaatttccggcctggcaggatgccgatcctttcacgatcggctaaacacttttcgggagccgctgcgctccctttttattccaccacgatccgcaaagcgcagtagaccaataacgctgccaacacccagttcagttgccgtccgtacagcaaaaacaggcgctgaaacagatgccccgccagcgcccagcacaggtttcccagcgcgccaatcgccgccagcagcagactcacgctaatgagccaaaccggctcgcgggtaacgggcaggacaaaggtagagagcgcggtgatgccgtacagaataatttttacgttgacgaactgcaggcccaggctcgcccagaaccccaccggctctgtactcagcgcgcctgctcccggtttacttttggctatctgccaggccagccacaggatatacgccgcgccaatccatcccaatagccgggtaaagcgtgagtcgagttccaccagcgaaaaggttaaagccgcgcaaatcagcatagtgataataaaaccaatgctcatccctgccagcacccgcagactgcggcgtaagccatgggaggtgacgctgctgagggcaagaatattattggggccgggagtcagcgcggttatcagggtataagtcaaaaaagcactaatcaaagctggggtcacttgtcttctccttcgttttggcagacagtacccgaagccattcatttaaaaaaatgaatgttttctgactctgaattcgataatttcgatagttggtggcgaaatggatctgcggcgttttattactctcaagacggtagtggaagaaggctcgtttttacgcgcggcgcaaaaactatgctgtacgcaatccaccgtgacctttcatattcaacagcttgagcaagaacttgccgttcagctgtttgaaaaaataggccgccgcatgtgcctgaccgaatccggtaaaaaggtgctgccgcacgtccatgaactggcgagggtgatggaaaccattcgtgaggcggctcgcgaggatagcgacccggctggtgagctgcgcgttgcctgtggggaaaccctgctggcctataaaatgccgcaggtgctacagcgctttaaacaacgggcgccgcaggtacgcttatcattgcaatcacttaactgttatgtcatccgtgatgcgctactcaacgatagcgccgatttgggcgtgttttatcgggttggcaacgatgacgcgttaaccatgacaagctttggccagcagccgctgacgctggtcgcctcgccgcagcatccggcggtcgattttacccgctgcgggcaacatattccgctgagctttgttatcaatgagccacagtgcgtatttcggcaaatttttgaaagcacgctgcgccagcgcaccattaccctggaaaatactattgagctctggagtatcgaaagtattaagcagtgcgtggcgagcaatcttggcgtcagctatctgccgcgtttcgccgttgaggaagagcttaagcgcggtacgctggttgaactcccgttcagcgatattccactcactattaacgcgatatgcgcccatcacgccggtaaagtgattagcccggcaatgcgggtatttatgcagtgtgttgaggaggcgttaggggcggattaaatgataattcccccaaacgacgaaggcctgaatcattgctgattcaggccttctgaatagtggcggaacggacgggactcgaacccgcgaccccctgcgtgacaggcaggtattctaaccgactgaactaccgctccgcattgttgttccgttgggaacgaggcgaatattacggtttccctacatcgccgtcaacgctttttcttcacttttgaatcgtttgctgcaaaattagcccgtccgcctatttttagcgcatattaccggcaatcaggcgcgccacaggcagcttccgcccttcttttgcaccaggtcgagacgcgattcatggtccgccagctcgctatcagaggcataaaccacgcgtaatttactggcggcgcggacaacgcgctgtattccaatatcgccggcctgctgttggccttctccttccatcgaaaacgccatgctggtctgcccaccggtcatcatcagatagacgtcagccagaatctgggcatcgagcaacgcgccgtgcagcgtacgcttgctgttgtctatttcataacgtgaacagagcgcatcaaggctgttacgcttgccggggaacatcttacgtgccagcgccaggctatcggtgaccttacaaaaggtttccgttttctcaatgccgcggttcagctttttgaattcataatccataaagccgatatcgaacgatgcgttatggatgaccagctccgcgccgcggatatactccatgaactcatcggcaacgtcggcaaatgtcggcttatccatgaggaattcatcggcaataccgtgaacgccgaaggcttcagggtccaccagccggtcgggcttcaggtaaacatggaagttattaccggtgaggcgacggttgatcacctctacggcgccgatctcgatgatcttatgcccttcatagtgggcgccgatctggttcataccggtggtttcggtatcgagaacaatctgtcgtgtaattgcagtgctcatagcggtcatttatgtcagacttgtcgtttacatatcgatttcaattacaggaagtctaccagagatgctcaaacaggtagaaattttcaccgatggttcttgcctggggaatccagggcctggcggctacggcgctattatgcgctatcgccagcatgaaaaaacctacagcgcgggctaccgcctgacgactaacaaccgcatggaactgatggctgccatcgtcgctctcgaagcgcttaaagagcactgcgaagtggtgctaagtaccgatagccagtacgtccgccaggggataacccagtggatccataactggaagaaacgcggctggaaaacggcggacaaaaagccggttaaaaatgtcgatctgtggaaacgccttgatgccgctctcggccagcatcagattaaatgggaatgggtcaaaggtcatgccggacacccggaaaacgaacgctgcgacgaacttgcgcgcgccgcggcgtctaaccccacgctggacgacgtcggctaccagccggaaagctaatttcccccgtcgcgccactgcctggtggcgccaacggccggacgcagctgcgtcttcgccttcccggacttcatcggatttagcgtcaacggaatggttcttttgcgcgcgacgatcatttgcaaacatcccaaagcaggcagatgagtacttagcatttttcccccctgcttcgaccagggcagcacctgatagcgaccgtagtgcagcacctcaaaattgagcagcgccagccagtcaagctgtcgcgtcatggtaaacatccggctgttataggggatagtttttcgcagaaccggcgtcactttgcgcaatccaatcaggctcagcgggttaaaagcagtcaaaatcatccagccatcgtcaatcagcacgcggtcagcttcccgcaacagccggtgcggatcgctgcaccatggcaaagtatgcgccagtaaacaggcatccaccgatttggcggcgaaaggaagatacagcgggtcggctttgacctggataggacttccccccagcgaaacgttcacctgatgggagatcgcgcaggcttcggtattgatttccgcgctcagattgccaatcttaagtagatgaaagccatataatttagccagccacggtttcatatgccgttccagcgactcgcgatagtattcaccccacggcatactggaccaatgctctggagctgtaattgtatgaggtatccttgccggcttcatcgcaaccttccgcaacgctttgagaggtaatttatgaatcttatcagtattcctgcatttcaggacaactacatctgggttgttagcgacgatagccgtcgttgtgtgatagtcgatcccggtgaagccgcgccggtactcgcggccattgaagaaaacaactggcagccagaagcgattttgttaacccaccaccaccatgatcatgttggcggcgtgaaagaactgcggcaaaaatttccgcaacttgtggtttacgggccggcagaaacccaggataagggaagcacggatattgtatctgatggcgatagcattactcttttgggtcacgaattttctattttcgccacgccaggtcacacattaggacatatctgtttctacagcaaaccttatctattttgtggcgacacaatgttttctggcggctgcggcaggctgttcgaaggtacagcagatcaaatgtatcaatcatttatgaaaataaatgcgcttcccgctgaccccctaatttgttgcgcacatgagtacactttagcaaacatgaagtttgcattgagtatcctgccagatgatatggatataaaggattactaccataaagttaaggagttacgcgcaaaaaaccaaaagacactacccgttactctgaaaaatgaacgccgtataaatttatttttacgtacggatgacaatgatttaattaaagaaatatccaaagaaacaaatttgcaacactcagcgcagagatttgcatggttaaggtcaaagaaagatgacttctgagatttaacgcttgtcatcctcggccttcaccgttatccttgctcgtcttttaagcaactattgacacacacatgaaggcacgagcgatattactcgcctctgtcctgctggtagggtgccaggcgtcgaagcacgacggcaccgtagaacagcgagcacagagcctttctgcagctggtcaaggggaagcaggcaagttcacaagtcaggcgcgatggttagatgatggaaccctctacgcgcaagaccaggatctgtggacttccataagcgacgagctaaagatgggaattccggaaaacccccggattcgcgaacagaaacagaagtacttacgtaataagagctatctccacgatgtaactttacgggctgaaccgtatatgtactggatagccgggcaagttaagaaacgtaacatgccaatggaactggtattactacccatagtggagagcgcttttgacccacacgcgacgtctggcgccaatgccgcaggcatttggcagatcattccgagcacagggcgcaattatggtttaaaacagacccgcagttacgatgcgcgtcgtgatgtcgttgcgtctactaccgcggcgctggacatgatgcaacgtctgaacaaaatgttcgacggcgactggttactgaccgtcgcggcatataacagcggcgaaggccgggtaatgaaggccgtgaaggcgaaccgttcgcgtggtaaacccaccgatttttggtcgctctcgctgccgcgtgaaaccaaggtctacgtgccaaaaatgctggctttgagcgatattctcaaaaacagcaagcgttacggcgtgaagctgccaacggctgatgaaagccgtgcgctggcgcgcgttcgcctcgatagtccggttgagatttctcagctcgcggacatggcaggaatgccggtcagcaagctgaaaacctttaacgccggcgtaaaggggtcaacgcttggcgctagcgggccaaagtacgttatggtgcctcagaagcacgcggctcaactgcgtgagtctctggcctctggcgacattgccgccgtacagccgacgcagcttgctgacaatacgccgctgaccagccatagctacaaggtacgttctggcgatacgatttccgggattgcttcgcgtctcggcgtcaccacccgggatctgcagcagtggaacaacctgcgcggttcagggttgaaagttgggcagaatctggttgtcggcgcaggcagcagcgcgcaacgtctggcgaacaacaatgatagcatcacctatcgtgttcgtaagggcgactcgctatcgagcatcgcaaaacgccacggcgtcaatatccgcgacgttatgcgctggaacagcgataccgataacctgaagccaggggatcagctaacgctgtttgtgaagaacaacgacagacctgaatcctgatttcagaataatgagaaaggcaccgattccccggtgccttttatattgccagcgctacactgctttatgcgcttcaaacatgatggtatcgctggtaaacgatccatcctgctgtaattcgaagtaggctttaacctccgccgatgcgctctgctgatataagcgaatcgcctccgccagcgcttctggcgtgcgcatccgcgcgacccaggagctaaactccagcggcagacgatcggtcaataaatgattgatcgccaggcctgcgtcgttggccagcgccagccactcgccgctggagtaattacgcacgtgcgaggtgtcgcgcagcgcttccaccgtttgcagccagacatcacgtaccggatgccccggagacattacgtccatgatgatcatcaccccgcccggcttcaacacgcgtttcacctcgcgcagcgcctggccgacatcatgccaatggtgagcagagtagcggctaatcaccacatcaaaactggcgtcggcaaacggcagcatttcagcatatccctgctgagtgacgatgttggtaaagcctttgtcttttgccgcctgagcgacaacctccagcatctggctcgataaatcatacgcggtaacctgcgctacctggcctgcggcggtaaaactggcgtgccctgccccgcatcccatatccagcaacgttgcctgcgggaaatccgccagccgttccgccagacgctgcagatcgcgcccggaggcgtgcacggcgctggtcagataggcgcttgcctgtgagccaaactgcttttcgacgttgtcatgatgagagcgtgttgtcattgtgttgtccttcggtggtttgagtaataaagggcagcatcgtgctgaacgcagacctgcccgatggcaggcctgacataccttaattaatcaggcttgccgggactgaattcgactagtagcgggttgtgatcggaggcgcgggtcaccagcacggaggcatcgtgcacgcttaatccgcggtagaacacaaaatcgagcgggcgaccaaacgcgcggcggcgctgatcgtcagagaaacgaacttcgcgtaacgacatctcacgcgcaaagcggtacagcgcgttcatccgcgggcggctccaggcgttgaaatcaccagccatgattaccggcccgctgtgatgggcaatctgatcgccaattggcagcaactgtttactatagacatcgacgccaagactaaaattaaccgcatggatattcaccaccattaacagccgcgcatcgggcagcggataaacggtcactaacgccgatttaggcaaacgtaaaataggttcgcgctcgcgcaagggacagcaatagatggggtgagcggaggccagcgtcatcacgccggaaggatgctgcggcaataccaacgccggcacctgatcggcggccagatagtttgaagtcgcgaacctgaccagttctggggtggtttgcgcctcctgcaacaggaccagatgcgcgtctttgccgaaatttttgagcactgactgccattctgcacgctgctgcttaaagatattccacaccagcacgcgaattttctcatcgctgcttaatggcgcgccggcgggataaaccggactgacgcccgcaaacgcccccggaggcaagattctctccgcgggttgtccggcgacatagcgcatggcataggtattctttcgcaatttgggcattcaacctcgataacaggaaaccagcccgactgcggctggttcttctgttatagggattttcccatacactttcaatgcaatttgcgagaaagccttatccttcgagagaaacggctgccgaacggcgtggagatttatccaaacgaccgctcagtacgaccagtagcaaagcaaccagcacaatcagcgcgccaatccacggcgtctgcgccagaccgtacagctcgaccgtctgtccaccaatgaccgaaccgagggcaataccaatattgaaggcagcgatgttcaaaccagaggcgacatcaacggcgcccggcgtgtattgttcagccttttgcaccacatagacctgcagacccggaacgttgccgaaggcgaaaatgcccatcaccagtaccgttgccagagcggcgtagtgcagattggccgtgaactggaagaccagcaacagcaccaccaacgcagcgaagataaatttcaacgcggcgacagcgccatgtttatcggcgagcttaccgccccacacgttaccgatagcgacagagataccgtaacccagcaggatccaactgaccgcagacgggctaaagccagccagctcctgcatcatcggcgcgaggaaagtaaatgcggtaaacacgccgccatagcccagcgcggtaatcgcgtagatcatcaacaggcgcggatgggtcaagactttcatctgatcgcgcaggctagcgccggcgcggcccggaatattattcggcaccaggatcaggctgctgataagcgcaatgacgcccaaaatcgataccgcgaggaacgtttcccgccagccaaaatgctgaccgatgaacgtcccgaaaggcaccccggttaccagcgcgaccgtcaggccgccgaacatgatagcaatggccgaggcggctttctcttttggcaccaggctggtggcaatcgtcgagccgatagaaaagaatacgccatgcgccaggccggtcagcaggcgggccataatcaaagtgccataacccggagcctgccacgctagcaggttaccggcggtaaacaacaccattaacgccagcaggagctgcttacgcggcatgcgcccggttagcgcggtcagcaccggggcgccaatcgccacgcctagcgcatagatggaaaccagcaggcccgcagacggcagcgagatagccagttgttcggcgatggtcggtaccagaccgacgatcacaaattcggtagtgccaatagcaaaggcaccgatggttaatgcaagtagcgccagtggcataatttactccgtagcatcaggattaagatgacacgtagtatgaagggatgtttaaataacaaaaaccatcaaaatctcaatagaattttgctataggtgcaacaatgagagccacgtcagaagagatcgctatcttcgtcgccgtagtggaaagcggcagttttagccgggcggccgagcagctcgggcaggcaaactctgccgtcagccgggcagtcaaaaagctggaatcaaagctaggcgttagtttgttaaaccggaccacgcgccagctgagcctgacagaagaaggcgagcgttatttccgccgcatgcaggtggtgttgcaggagatggcggctgctgagaacgagcttctggagacgcgcaccacccctcgcggattgcttcgcgttgatgccgccaccccggtgatgctgcattttttaatgccgctggtaaaaccgtttcgcgaacgttatccagaaatgacgctctcgctggtctcctcggaaaccttcattaatcttatagaacgtaaagtcgatgtcgcgatccgcgtgggtaccctaaccgattccagcctgcgcgcccgcccgctgttcaccagctatcgcaagatcatcgcctcgcctgattatatcgcccgctacggcacgccggtgaatgcggaagatcttgcggatcatctctgcctggggttcaccgagcctgtctcattaaatacctggcctattgccgccagcgatggccaattactggaagtcggttgcgaaattacctctaacagtggcgaaacgctaaaacagctctgtcttggcggcaatggtattgcctgtctatcggattatatggtggataaagagattgccagcggggagtttgtggagctacttgccgacaagcgcttgccggtggagatgcctttcagtgcggtgtattacagcgacagagccgtcagcacgcgtatcagggcatttattgactttctgagtgagcacgtcaaacagctcccgaaggagctgtaagaaactatcgtccggcagcggcgtcaaccgcctgccggaatcggtggattaatcccacttcggcgccagaccttccgggcttaccagacggtcgttgcaatccagcgcggcaatcgctttacgatcttcatcatccagcttcagatccagcgctttcaggttgctcgccagattttcacgcttggtggaagatggaataaccgcataaccttctcccatcgcccacgccagaataacctgtgccggggtcgcattatgtttcgccgcgatacgggcaatcacttcatctttcagcgccttaccgtaggctagcgtcatgtaagaggtgatgtggatcccgtgttcacgcgcccaatcgaccactttacggttctgcaggtacggagacagttcaacctggttggtcgcgatattttcagcgccaacggcagcgatcgcacgttccatcagtggaatagtgaagttagagataccgatctgtcgggtcagacccagcttcttcgcttccatcagcgcagccataaactcttcaacagcaaccgcatcgttcggcgacggccagtgaatcagcgtcagatcaacataatcggtgcgcagcttctgcaggctctctttcaggctggcgatcagcttgtctttactcaggttttcgatccagattttggtggtgatgaacagttcatcacgcggcacgccgctttccgtgatagcctggccaacagcggcttcgttttcatagatctgtgcggtatcgatagtacgatagcccagctccagcgccatttttacagagttgatgactacgtcgtcttgcagacggaaagtgccaagaccaaatgcagggattgtcatgattgatgttcctcgttaattattcgtttcgcttaactgaggccattatgggtgaaggttgggttgggaaaaagatcgataaatgcagaggatttttgctgatttagcaataattggaatggagaaaacaaaaaagccctgagcaaatgctcagggcttttaataagtggcggaacggacgggactcgaacccgcgaccccctgcgtgacaggcaggtattctaaccgactgaactaccgctccaccgaattttttctacatctaccggtttaatgccccggttttactgcaaatttgatgcctggcagttccctactctcacatggggagaccccacactaccatcggcgctacggcgtttcacttctgagttcggcatggggtcaggtgggaccaccgcgctatcgccgccaggcaaattctttgtgctcgtcctgtgtcttttgcgctcatactgcgttggctgctctcgcgaatgtcagtcacatacttcagtatgctccttccatcgcttcgtttgccgccttgtctcagcgcaaaatccttcggactctgaatctaagctgaaaatcgtctcaaatcgccaaaacaccttcggcgttgtaaggttaagcctcacggttcattagtatcggttagctcaacgtatcgctacgcttacacacccgacctatcaacgtcatcgtctttaacgttccttcaggactctcaaggagtcagggagaactcatctcggggcaagtttcgtgcttagatgctttcagcacttatctcttccgcatttagctaccgggcaatgccattggcatgacaacccgaacaccagtgatgcgtccactccggtcctctcgtactaggagcagcccccctcaattctccagcgcccacggcagatagggaccgaactgtctcacgacgttctaaacccagctcgcgtaccactttaaatggcgaacagccatacccttgggacctacttcagccccaggatgtgatgagccgacatcgaggtgccaaacaccgccgtcgatatgaactcttgggcggtatcagcctgttatccccggagtaccttttatccgttgagcgatggcccttccattcagaaccaccggatcactatgacctgctttcgcacctgctcgcgccgtcacgctcgcagtcaagctagcttatgccattgcactaacctcctgatgtccgaccaggattagctaaccttcgtgctcctccgttactctttgggaggagaccgccccagtcaaactacccaccagacactgtccgcaaccccgataaggggccaacgttagaacatcaaacatattaagggtggtatttcaggttggctccacgcagactggcgtccacgcttcaaagcctcccacctatcctacacatcaaggctcaatgttcagtgtcaagctatagtaaaggttcacggggtctttccgtcttgccgcgggtacactgcatcttcacagcgagttcaatttcactgagtctcgggtggagacagcctggccatcattacgccattcgtgcaggtcggaacttacccgacaaggaatttcgctaccttaggaccgttatagttacggccgccgtttaccggggcttcgatcaagagcttctccttacggataaccccatcaattaaccttccggcaccgggcaggcgtcacaccgtatacgtccactttcgtgtttgcacagtgctgtgtttttaataaacagttgcagccagctggtatcttcgactgatttcagctccacccgcaggggcttcacctacatatcagcgtgccttctcccgaagttacggcaccattttgcctagttccttcacccgagttctctcaagcgccttggtattctctacctgaccacctgtgtcggtttggggtacgattcaatgttacctgatgcttagaggcttttcctggaagcagggcatttgttacttcagcaccgtagtgcctcgtcatcacacctcagcgttaaaaggtaccggatttacctggaacctccgcctacatgcttaaaccgggacaaccgtcgcccggctaacatagccttctccgtccccccttcgcagtaacaccaagtacaggaatattaacctgtttcccatcgactacgcctttcggcctcgccttaggggtcgactcaccctgccccgattaacgttggacaggaacccttggtcttccggcgtgcgggcttttcacccgcattatcgttacttatgtcagcattcgcacttctgatacctccagcaaccctcacaggccaccttcgcaggcttacagaacgctcccctacccaacaacacatagtgtcgctgccgcagcttcggtgcacagtttagccccgttacatcttccgcgcaggccgactcgaccagtgagctattacgctttctttaaatgatggctgcttctaagccaacatcctggctgtctgtgccttcccacatcgtttcccacttaactgtgactttgggaccttagctggcggtctgggttgtttccctcttcacgacggacgttagcacccgccgtgtgtctcccgtgataacattcttcggtattcgtagtttgcatcgggttggtaagtcgggatgaccccctagccgaaacagtgctctacccccgaagatgaattcacgaggcgctacctaaatagctttcggggagaaccagctatctcccggtttgattggcctttcacccccagccacaagtcatccgctaatttttcaacattagtcggttcggtcctccagttagtgttacccaaccttcaacctgcccatggctagatcaccgggtttcgggtctataccctgcaacttaacgcccagttaagactcggtttccctgcggctcccctatacggttaaccttgctacagaatataagtcgctgacccattatacaaaaggtacgcagtcacaccataaaggtgctcccactgcttgtacgtacacggtttcaggttctttttcactcccctcgccggggttcttttcgcctttccctcacggtactggttcactatcggtcagtcaggagtatttagccttggaggatggtccccccatattcagacaggataccacgtgtcccgccctactcttcgagttcacagcctgtgcattttggtgtacgggactatcaccctgtaccgtcggactttccagaccgttccactaacacacaagctgattcagactctgggctgctccccgttcgctcgccgctactgggggaatctcggttgatttcttttcctcggggtacttagatgtttcagttcccccggttcgcctcgttaacctatgtattcagttaacgatagtgcaacgaattgcactgggtttccccattcggacatcgccggctgtaacggttcatatcaccttaccgacgcttttcgcagattagcacgtccttcatcgcctctgactgccagggcatccaccgtgtacgcttagtcgcttaacctcacaacccgaagatgtttcgtaaaacacccacgtgtcgcgaaaatttgagagactcgaacacacattgactgtgtgtcgtttcaattttcagcttgatccagatttttaaagagcaaaacttcgcagtgaaccttttcaggtacactctgaagttttctgtttttgcagtaaggatggtggagctatgcgggatcgaaccgcagacctcctgcgtgcaaagcaggcgctctcccagctgagctatagccccatcgaatgaatctcttttaacctttaattcgttttcgggcgcggcgtggtgaagcgaagcatactgaagtatgcgagctttgccacaacaaagcacgagagcgaatttggtaggcctgagtggacttgaaccaccgacctcacccttatcaggggtgcgctctaaccacctgagctacaagcctgcagagattacttactgctgtattttcatcagacaatctgtgtgagcactacaaaggcaggttctttaaggtaaggaggtgatccaaccgcaggttcccctacggttaccttgttacgacttcaccccagtcatgaatcacaaagtggtaagcgccctcccgaaggttaagctacctacttcttttgcaacccactcccatggtgtgacgggcggtgtgtacaaggcccgggaacgtattcaccgtagcattctgatctacgattactagcgattccgacttcatggagtcgagttgcagactccaatccggactacgacatactttatgaggtccgcttgctctcgcgaggtcgcttctctttgtatatgccattgtagcacgtgtgtagccctactcgtaagggccatgatgacttgacgtcatccccaccttcctccagtttatcactggcagtctcctttgagttcccggccggaccgctggcaacaaaggataagggttgcgctcgttgcgggacttaacccaacatttcacaacacgagctgacgacagccatgcagcacctgtctcagagttcccgaaggcaccaaagcatctctgctaagttctctggatgtcaagagtaggtaaggttcttcgcgttgcatcgaattaaaccacatgctccaccgcttgtgcgggcccccgtcaattcatttgagttttaaccttgcggccgtactccccaggcggtcgacttaacgcgttagctccggaagccacgcctcaagggcacaacctccaagtcgacatcgtttacggcgtggactaccagggtatctaatcctgtttgctccccacgctttcgcacctgagcgtcagtctttgtccagggggccgccttcgccaccggtattcctccagatctctacgcatttcaccgctacacctggaattctacccccctctacaagactctagcctgccagtttcgaatgcagttcccaggttgagcccggggatttcacatccgacttgacagaccgcctgcgtgcgctttacgcccagtaattccgattaacgcttgcaccctccgtattaccgcggctgctggcacggagttagccggtgcttcttctgcgagtaacgtcaatcgccaaggttattaaccttaacgccttcctcctcgctgaaagtactttacaacccgaaggccttcttcatacacgcggcatggctgcatcaggcttgcgcccattgtgcaatattccccactgctgcctcccgtaggagtctggaccgtgtctcagttccagtgtggctggtcatcctctcagaccagctagggatcgtcgcctaggtgagccattaccccacctactagctaatcccatctgggcacatctgatggcatgaggcccgaaggtcccccactttggtcttgcgacgttatgcggtattagctaccgtttccagtagttatccccctccatcaggcagtttcccagacattactcacccgtccgccgctcgtcacccgagagcaagctctctgtgttaccgctcgacttgcatgtgttaggcctgccgccagcgttcaatctgagccatgatcaaactcttcaatttaagtttgatgctcgtgaattaaacttcgtaatgaattacgtatgttcactcagagacttggtattcatttttcgtccgaggacgttaagaatccatgtcactttgagtgcccacacagattgtctgataaattgttaaagagcagttgcgacgcgctttagcgctctgtcgcgaggtggcgtatattacgctttcctctttcagagtcaaccctgaatttcagaatttttctcttcaaccgaaccggctgtttgtgtgaagtgattcacatccgccgtgtcgatggaggcgcattatagggagcccgccgggaatgacaagcggaaaaatacatttttatttcaaccgctcatcttttatacgtaacgcttatttttgctgctttttaatagccgcaggcaggtccgccaggctatttagcacccaatccgctgcgctttccgcttcttcggtaaccggcttaccggtacgcaccagcactttcgttccgacattcgccgctgcagccgcctgcatgtcttcgagtttatcacccaccatataagaagcggccatatcaatatgcaggaaatcgcgtgcggaaatgagcatccccggatgcggcttacggcaatcgcaggtctggcggaactcttcaacgctcccctgcgggtgatgcggacaataatagataccgtcgagatccacgccgcggtctgccagcgaccaatccatccattcggtgagggtctcaaattgcgcttccgtgaatttaccgcgcgcgatgcctgactggttggtcaccagcactaacgcaaatcccattgcctttagttcacgcatggcatcaatgacgccgtcgataaactcaaagctgtcgatttcgtggacgtaaccatgatcgatattaatcgtgccgtcacggtcgagaaaaattgcgggtacagactttgccaccggtttgctcctgataaaggctaatgccgttagtatcgcatgtttcggcatgcaagaaagtgctcattataaagagtcagattgatttagacgtctggatgccttaacatccatttcattgacaggcatcgcctgcacacggcagaagaaaatgccacggcaaacggctaaacgataataaataactgatgattaaactttcgaatattaccaaagtgttccagcaggggaaccgcaccatacaggcgctgaacaatgtcagcctgcatgtccctgccgggcaaatttacggcgtgatcggcgcttccggcgcaggtaaaagtacgctgattcgctgcgttaacctgctggaacgcccaaccgaaggcagcgtgcaggtagataaccaggaactcaccgcgctgactgaaaaagaactgactcgcgcgcgccgtcagattggcatgatcttccagcactttaatctgctcgcttcacgtaccgttttcggcaacgtggcgctgccgcttgagctggataacacaccgccggcggaaatcaaacgccgtgttaatgaactgcttgacctggttggtcttggcgataagcatgacagctatccggcaaacctctccggcggccagaaacagcgcgtggcgattgcccgcgcgctggccagcaatccaaaggtgctgctgtgcgatgaagccaccagcgcgctggacccggcaacgacccgttcgatcctcgaactgctgaaagacattaaccgtcgtctggggctgaccattctgttgatcacccatgaaatggacgtagttaaacgtatctgcgactgtgtggcggtcattagcaatggtcaactgatcgagcaggacaccgtgagcgaagtcttctcccatcctaagacgccgctcgcccaacagttcattcaatctaccctgcatctggatattccggatgactatcaggcgcgcctgaagcccacgcagttgcctgacagcgtgccgatgctgcgtatggagtttaccggccattccgtcgatgcgccgctgctgtcggaaaccgcccgccgctttaatgtgaataacaacattattagcgcgcagatggattacgccggcggagtgaagttcggcatcatgctgaccgaaatgcacggcacacaggaagatacccaggcggcgatcgcctggctgcaggaacatcatgtaaaagtagaggtactgggatatgtctgaaccaatgatctggctgctggttcgcggcgtgtgggaaacgctggctatgacgtttgtctccggcttctttggctttgtgctcggcctgccggtcggcgtactgctgtacgttacccgtccggggcagattgccgccagcgcccggctgtatcgtacgctatcggcgctggttaatatcttccgctcgattccattcattattctgctggtgtggatgattccatttacccgcgtgatcgtcggtacctctatcggcctgcaggcagcaattgtgccattaacggttggcgccgcgccgtttatcgcacgtatggtggaaaacgcgctgttggagatcccgaccgggcttatcgaagcctcacgcgcgatgggcgcaacgccgatgcagatcgtgcgtaaagtcctgctccctgaagcgctgccgggtctggtgaacgccgccaccattacgctcatcaccctggtgggttattccgcaatgggcggtgcggtcggtgccggtggtctgggtcagattggctatcagtacggctacatcggctataacgcgacggtaatgaacaccgtactggtattgctggttattctggtttatttaattcaattctctggcgatcgtatcgtccgggctgtgactcacaaataacgttattgacacacaacactaattcttacaggaaggaaataacatggcctttaatttcaaaacctttgcggcagttggcgcattaatcggttctctggctctggtgggttgcggtcaggatgaaaaagatcctaaccatattaaagtcggcgtgatcgtcggtgcggaacagcaggttgctgaagtcgcgcagaaagtggcaaaagagaagtatggccttgacgttgaactggtgaccttcaacgactacgtgttgccgaacgaagcgctgagcaaaggcgacatcgacgttaacgccttccagcacaaaccgtatctcgaccagcagattaaagaccgcggttataagctggtttccgtcggcaacaccttcgtctatccgatcgctggctactcgaagaaaatcaaatctttggacgaactgcagccgggctcacagattgccgtaccgaacgatccgaccaacctcggccgctccctgctgctgctacagcaagtgggtctgattaaactgaaagaaggcgtaggtctgctgccgacatctctggatgtggttgagaacccgaaaaacctgaagatcgttgaactggaagcaccgcagctgccgcgttctctggacgacgcgcagatcgctctggcagtcatcaacaccacctacgccagccagattggcctgacgccggcgaaagacggtatctttgttgaagacaaaaactcgccgtacgtaaacctgatcgtcgcccgcgaagataataaagacgcggaaaatgttaagaaatttgttcaggcttaccaaagcgatgaagtttacgaagccgctaacaaaatctttaacggcggcgcagtgaaaggctggtaatctgctttcagcgtaatatcattcaggacgggctttatgcccgtcttgtcatttttgcaagcacctgattcaatagcgccctgttttataattcattgaggaaatactatgcgtgctttaccggtctgtttgttagcactcatgttaagcggttgttctatgctaagcagatcccccgttgagcctgttaaaagcaccgcaaccacgccagtccagacggaaacggctaaaccaaaagtctcacgtcccgcgccggtcagaatctataccgatgccgccgcgctggttgggaaacccttccgcgatctgggtgaagtgagcggcgaatcatgccaggcttcaaaccaggactccccgccgaacatcccgaccgcccgtaaacgcatgcaaatcaacgcggccaaaatgaaggccaacgccgtgctgctgcacagctgcgaagtgaccagcggtacgccaggctgctaccgtcaggccgtttgcctgggttcagcgcttaacgtctcggcgcaatgagtgcatttcagttcgcgcaaataggcgtcatccgctcgccgtataaagagaagtttgccattcctcgccagcctggtctggttgaacacggcggcggagaacttcatctgctcgcgccctataaccaggttgacgccgtgcgtggactggaaaacttcagccatctgtgggtgctgttcgtctttcatcagaccatggctggcggctggcgcccgaccgtgcgccctccccgccttggcggcaacgcgcgcatgggcgtcttcgcgacccgctcgacatttcgccccaaccctatcggcatgtcgctggttgaactgaaaggcgttcgctgccagaaggatcaggtaatactggaacttggcagcctcgatctcgttgacggcacgccggtggttgatatcaaaccttatcttccctttgccgaagccctgcctgatgccagcgccagctatgcgcaacaggcgccgctggcaggcatgaatgtcagctttacgccggaaatagaagcacagttactgacgctggaaaaacgctacccgcatatcaaagcgtttatccgtgaagtactggcgcaggatccgcgtccggcttatcgcaaagaggaagaagcagggaaaacctacgccgtctggttgctcgatttcaacgtgcgctggcgggtaatcccctccggttttgaagtcttttctctcgaaccgcgctaattttattttcctctcttttggcatctttgccacactggtaaactaaaccactttttttgtttcaggctggctctccagcctgttccgatcgtccaaatggaaccgtaacaacatgcgtactagccaatatctgctctccactctgaaggagacacctgccgacgccgaagtcatcagccatcagctgatgctacgcgccgggatgatccgcaagctggcctcagggttgtacacctggctgccgaccggcgtgcgcgttctgaaaaaagtcgagaacatcgtgcgtgaagagatgaacaacgccggtgctatcgaggtgttaatgccggtagttcagccttctgaactgtggcaggagagcggtcgctgggagcaatatggccctgagctgctgcgcattgccgatcgtggcgatcgcccattcgtcctcgggccgactcacgaagaggtcattactgacctgattcgcaatgagctgaactcgtacaaacagctgccgctgaacttttatcagattcagaccaagttccgcgatgaagttcgcccgcgtttcggcgtgatgcgctcccgtgagttcctgatgaaagatgcttactctttccatacctctcaggaatcgctgcaggaaacctatgacgcgatgtataccgcttacagcaaaatcttcagccgtatggggctggatttccgcgcggtacaggctgacaccggttcgatcggcggtagcgcttcccatgagttccaggtactggcgcagagcggcgaagatgacgtgatcttctctgacagctccgactacgcggcgaacattgagtttgccgaagccgtcgcgccgaaagagccgcgcgcagccgcgacgcaagaaatgacgctggtagacacgccgaacgcgaaaaccatcgccgagctggttgagcagttcaatctgccaatcgaaaaaaccgttaagaccctgctggtgaaagcggtagaagatagcagctacccgctggtcgccctgctggtacgcggcgatcatgagctcaacgaagtaaaagcggaaaaactgccgcaggtcgccagcccgctgaccttcgccagcgaagaagagatccgcgctattgttaacgcggggccaggttctctcggcccggttaatatgccgattccggtggttatcgaccgtaccgtcgcggccatgagcgatttcgccgccggcgccaacatcgatggcaaacactattttggcattaactgggatcgcgatgtcgcgactccggaagttgctgatattcgtaatgtcgttgccggcgatccgagcccggatggtaaaggtactctgcttatcaagcgtggtatcgaagtgggacacatcttccagttaggcaccaagtactcgcaggcgatgaatgccgcggtacagggtgaagacggccgcaaccaggtcctgaccatgggctgctacggtattggggtgacccgcgtggtggccgccgctattgagcagaactttgacgatcgcggcattatctggccggacgccatcgcgccgttccaggtcgctattttgccgatgaacatgcacaagtcctatcgcgtgcaggagctggcagagaagctctacgccgagctgcgcgcacatggcatcgacgtgctgatggacgaccgtaaagagcgtccaggcgtgatgttcgccgatatggagctgatcggcatcccgcacaccatcgtgctgggcgaccgtaacctcgataacgatgatatcgaatacaaacatcgtcgcaacggcgagaagcagctgattaagactggggatatcgtgaactacctggtgcagcaaattaagggttaatttccccttaaaagctaaaaggcctcgcaatagcgaggccttttttatagcaactgcaagaattaattaccgcagtctttacccggaataaatttgctgtctttatccgtcattagcgttttcatcatctcgccggtatcgggattcgcttcaagcgtgaagtgtccttcaaccaccagcaataccggacgagtatccgtcccgcgcgcagcggcataatctcgctcaagctgggcgttattggcaaccgccaccgttttacctgtgacgcaatcggtaaaggttgccgcatccgccatatagaaatacatcccgcgcatcgccatcggcgtcgtcggcaggctggccttcaccgactccagcgtatagttaagcgcagagttaatcgggttgccgtcgcgatcgagcatctcaagcttatcgcctttcgcccgatagtaagatttctcgcctttactgttggtcagcactagcttatcagcggtacgcgcccaggtgccatacgaagcgaaagatgacggctcgtggctaacgccctgataacgttcgttcattacccaggtgccgtctttctcaagaaataacgaggtctcaatcccttcgcaatccgcgcaaggcaaaataccgcgccagctttgctgcatcggcttcagctcttccattgccgtcggctgtaccgtctccacctcagcgcgatggttacagccaaacagcgcaaagagcgaacaggccgctgcgagcgaaaatacaattttcttcactgtgaattccttataatccattccacccgtccgccacgcctctcaatggcgaactttcccacgcagcgctttgactgaggacttttgtgccttggaggcaagtcgtcgctcttttgacgcccgagtcggtcgcgtctcccggcggcttttttgcactgcggttaattcttttattaacgcaaccagccgcgagatcgccgcttcgcggttcatctcctggctgcgatattcctgagccttaatgataaccacaccgtcagcagaaattaagtggtgactggcggcaagcaggcgctctttataaaactccggcaggctcgatgctttaatatcaaaacgtaagtgaatcgccgtcgaagccttattcacgtgctgaccgcccgccccctgtgcgcggaccccggtaagcgaaatctcctcatccgggatggaaacgctgcggctaatcatgatcatgccggctgctgccaggccgttaaatgaatttccagattattccgatcgtcggataaccagatgccgccgtcctgcagggttgcctgcagcgtcatggtgcgatcggcaaaagcgctcagctgcgccagttgtgcatcatcaagataccagatggtcagcttcggatacgccgcaagcttattctgattctgctgccaccagatttcagccgcccggctattataggcgaatagcgccacctcctgcgcccgcgagcaggctttcttgaggcgcttctcgtccggcagccccagctcaatccacagatcgatgcccaaatggtcgtttaactgccatagctccggttcatcatccgaggacaacccgcgggtgaactgcaggcgctcgttggcatattttatccacgccagcaggcgcagcatcatacgctcctgggtttcggaaggatgttgcgccagcgtcaggttagcatccagaaactggttgcgatccaaatcggcaacgttaaccacagctttataaatcgtcgctttcagcgccatgaataaactcctgaaaaaaatggcatacattgtagcgaaactagcgacaaaaggctgtcgtcaatcgcgggtcctcctttcatcctgctgatattgcttagatgactatggtatagtcaccttgctaaacagagtttatcttcgtaggcttaaacttgcatcccacggttaagtcagaacgctgacaggagggcatgtggatcaatattgtgagttaatacgcaagcggtatgcggaaatagccagcggagacttagggtatatcccggatgcgctgggctgcgtgttgaaagtattaaatgaggttgcggcggatcaggccctttcggagtcagtcagggaaaaggccgcttatgcggcagcaaacttattggtgagcgattatgtcaatgaatgatacttatcaacccattaactgcgatgattatgacaacctcgagcttgcctgccagcatcacctggtgctggcgctggccctgaaagatggtgaacagctgcaggccaaagcaaacgatcttatctcgcgtaaaaatgtcgagtatctggtggtagaacttggcggtaacgtccgtgagctacgtctggataaaatcgccagtttcagccatcctgaaatcggcaccgtggtggtcagcgaatcctgaagcccatcgggcggcttagccgcccgttttccgccataccagctgtaacccctcgccttcctgtacttgcccctctctggtgacaaacagcccatcggccgccgcgatcaacgtttcgccataaaacaatagtggcgtggtatcgcgacgccagggcgcgaccgccatttcctgccagattttcttaagcttacgcccgcccggacgcccgacgatgtgcagattaccgctggcgcgaaaacgtatcgataccggttcatccgcgcgtggcgcgcgtagcggcccaccgggctgcaacgccagttctcccagcgtttccggtagtgtcagcgctttagtcgcatcaccccatggtatttcccgttccgtcaggcttgccagatgctttacccaaaacaagcgctgctggtagcgccggacggcaaaaccgcctaaccgcagacaaggcgcggcgtcttcacgcgccagcgccacttcctgccagatgcgctccggcatttcacgcgacggcatcggcgcctgttgggatgccagccagcggcgcaacagcgccgcacgacgcggcgcgctcatcgcgctcagcggttctatcgccagcgaaccacgctcatcaaccagcgcggcaagctccgccgacagcatttcatcaagcaactgttcctgttcgccacataagctggcactgcgggcgacagcatccgcaaaatgcggccagcgctcgctcagcagcggcagtactcgcaggcgcagaaagttgcgatcgtaggcatcgtcctgattactttcgtcttcaatccaccgcagttgatgagtcagcgcccattgatgcagggattcacggctctcattgagcagcggacgtagcaattttccgccagcgaactcgctactggcggccatcgccgacaagccggtcgggccgctaccgcgcttaagcgccagcaggaaggtctcgcattggtcgtcgagatgttgtgccgtcaataacgcctcgcctggcagcagcgcctcacggaaagcctgatagcgcgcctggcgagcatgcgcttcaatccccaacccctcatccgccagcgtcacgcgcaccacctgtaacggtacctgccactgcaggcaaatctgttcgcaatgctcaacccactggtcagcgttggcgctcaggccgtggtgaatgtgaatcgcgcgcagctgaatcgctggctcacgctggcgccagcgtaccagccggtgcagcaggacggttgagtccaggccgccgctgaaggccagcagaaactgacgatgtggtcgaagcgatgaggcaatatccggcgtcatgatcgtgcttacgcagctaagaagagatagcccggcacgttacgcgccagggctggttctggcaagtattactgttggtaaatctccagcggcaggccgtcgggatcgttgaagaaggtgaaacgcttatcggtaaacggatcgatgcggatagcttcacaggcgacgccatgcgcctgcaaatgcgcaaccgcggtatcaatatcgtcgacgctaaacgccaggtggcgcagaccacaggcttccggacggcttgggcgcgcaggagggaacgggaacgaaaacagctcgataacgtactcgccgttcagcgccaggtcgcccttccacgaatcacgctcggcgcggtagaactcgctctgcagcgtaaacccgaggatgtcgcaatagaacgctttgctcttcgcgtagtctgtcgcgatgatggcaatatggtgaactcgttttaaacccagcatggttgttctcctcctgttgaagcccaacacgttactcgcgccgcccgccgccgcgcaagcccctaattattttttaagactcgtacacggtagacgccgtcttcatcacgtttggccccgtggatgtcggtttcaaaacctggatagtggcgaccaatcgagcagagcatcaacagaaaatcgagcaccgcgcggctctcttcggtgatcatctcccccggcatcagcagcggcacgccaggcggatacggcaggatcatgtttgccgaaatacgccccaccagattctccagttcgatggtttcgacttcgcccttaatctgccgctgccaggcctgatgcggggtcattttcatctccggcagcacgtcaaaggcccgcagcataagctgtgagagctgatgctgacggatcaggcggtggatcccctgcgccagatcctggatgcgcatattgcggtagaagtccggatcctcagcgtagagatccggcaacatatttttcacccgcaggttgagatcgtaggcgcgtttaaactcggtcagaccgcgcagcaggcccatcgcccgggttttatcgataccgatactgaacaagaacagcagattgtaaggcccggttttctccaccaccacgccgcgctcatcgaggaatttggccaccagcgcggccgggatcccctcttccgccatattgccctgctcgtccatacccggcgtgagaatggtgactttgaccgggtcgaggaacatatggtcgtcatcggcatcctggaatccgtgccacgcttctccaggggaaactggccagcattgcgcttcgtcgacctcctccggttgccagatatcaaagaaccagccgtcggcctcctcacgcaagcgctgcacctccttacggaaatgtagcgcgcgttcgatagagcgctgaatcaggcgttttccggagttgccgcgcagcatcgccgctgcggtttctatcgaggcgacgatcggatagctcggcgaggtagaggtatgcatcataaaggcttcattgaaggtatcttcatcgtagctgcctttaatatggatcaacgaagcctgcgacaacgccgccagcattttatgcgtcgactgggtttcgaagatcactttccccggtacgcgatcgccgctcatgccgcttttcccctgataaatcgggtgaaagtgggtataaggcacccaggcggaatcgaagtggatcgacggcacgtcaagggtctgtttaatccaggtggtgttatacaacagcccatcataggtggagttggtgatcaccgcatgcaccggccactgcgcgccacaagttgtctctactttgtgctggacgctatcgcgggtaaattcccgtttcggaatgccgccgaggatccccagcgcgttacgcgtcggttttaaccacagcggcacgatatcgctcatcatcaacagatgcgccagcgatttatggcagttacggtcgatcagcaacgtactgccagcgggcgccgaatacatgccgacaattttattcgaagtcgaggtgccgttggtcaccatgtagctctgctcggcgccaaaggcgcgagcgatatactcttccgcttccagatgcgggccggtatggtccagcagcgatcccagttcggtaacagagatagaaacatcggctttcagcgtattaccgccgaagaaatcataaaacaggcagccgaccgggcttttctggtaggcggttcccgccatgtgtccgggagtgcaaaaggtatatttcccctcctgcacatagttaaataacgctttggtaaagggcggcgtgatgttgtccagatactcattggtatactggcgaatgcgggtagcgatatcttccgccagacccagcgcatattcgaagaaccacaacgccatccgcaggtcctggctgctgacgtccatcgtcgagtgcgtattgataaaagcatacagcgggagatattcattcaggcgattgatatcgctgcataaatcaacgctgtactcgtcccagtcgaagatcacgccgcagatacgcgggttgtgctcgataaactgcagcaggtcggcgctgttttgcggccagatagtctggaatccttgcttctgcagagcggcttccagctctttgatcggttcgtctttatggtagacgccgtggggccccatgatggcgatgatattcacgctttcctcctggatttacctaaggtaagcataatatcaatcgcgccagtgcttagcactggcggatttatcttagtcctgagtcatagcaaagcgatgattacagcgctttccacgcatcaccccaggccagaccagcgcccggttcgtagtaggttggcgccacgttgcaccatgccccttccggcagcggtttacactggaaaagcgcgccgtggttattgacgatgtcacctggtttccagctctggctggcgctccacgctggatagttgataacgccgctatcgcctgccggctcatccttcgcgtcatccgccgccgccttcgccttcacattcagagtataggtggccgtgctggataaactgccatcgctaacggtcaggctaacgacatactgggcatctttgtcgctctctggtgcgctaaaattgatcaccgctttatccgcgccgctcaacgtctgaccatcctgcgacatccagctatagctcagcttatcgccgttggcatcggtagaggcttccgcgctcagcgacaccaggctaccggcttcgactgcgccgaccgggccggcaatacgcgccaccggcgcgacgtttacctgtggagcaggcgtaacatcatccgtcttatcagacgcgccatcactacccgcatcatcaaccacggttacgttgaagtagtgctgcacgcatttgctgtaatccccctctttaaacgcgctgtacggcgtctgatagctcaccagctggcaggcattggttttaccgtccgcggtgtccggatcccatccccaatcctgttcccagtagattggcagcgcgccggctccgccttcatcaaactgcttcatgttcttacagcccagcacttcatcatcggcaataggtactttgaggtagttggcgaactctttgtaataggcaatacggttaagcgattgggcgttttccgttgcgccgccgcactcgacgccgccgttgatgatctggatgctcacgccaaaccctggcaccaggccattgctcttatcacgatcgttgggctgccaggtaccgtcgataacgtgcagcatggaaggcttcggcggctgcggatagacaaagaagaacacggcgctggcgaggttcatccatgaatcggccaccaactgtggtttatccaacagcgggcgaacgtcgccatacatcgcctctgagaacgggccgtagttgtagttataggagagctgtttagcgccgcggccaaaatagctgaggaaatcgccatcggcatctttaccgcaaagccaggtctgcccctgccagacatccgggttacattcgccgttatagccgcccttttgaccttcggtccagccgacttcgcgcagatagaccagcgcctggcgccattccggaatatcgcgccagctttcgtggccgccggtttcctgagcaaagtgggcaaacatcgttgccagcgatttacggcagatagcatcgctatcgcgaccatcggtataggtaccgcataccgccgggaatttaccgatcgccttgaggaaattgctgtaggtatattccggcgcgcgcatcgggaacagataatcccaatcctgctcgctaagcatgccttcaacgcgcttaacgttctccggattcgccgccctaccgggttcaatctgctccaccacggcattatcgagggtgcgaatagaggatttaaccgcttccatcagcggaaagtcggttagcgctttttcttttgccgccagttcgctggcggtcatggtggttgtttcagtggcgctgagcaacggcgccgcctgtgcggcccccagacttaacatgatccctgccgccacggcgcttaaggcgacggttttatgaattgccataatattattctccttttccttatgaacggtctgcccaggcgttgtccccggcagtgagcgcagtgtcacgggaaaaagacatcatcggctaatcacatcacctcattgacgtatcatcttacctcagtgaaaaaatgataaaaaaagggccggaaatccggccccttagagaattgtgatgcgctgataaatcaggcgtagccgtagctcatcagacgctgatagcggcgattacgcagctcttcttcgctgagagtatccaggtcagccaggtcggccaacagctgtgccttcaggctcgccgccatcgcttcagggttacgatgagcgccgcccagcggttctggaacgatggaatcaataagcttcagctctttgaggcgtggcgcgatgatacccatcgcttccgcggccagcggcgctttatccgcgcttttccacagaatggacgcacagccttccggcgagataactgaataggtgctgtactgcagcatgttgactttatcacctacgccgatcgccagcgcgccgccggagccgccttcgccaatcacggtgcagataaccggcacgctcagacgcgacatttcacgcaggttgcgggcaatcgcttccgactggccgcgctcttccgcgccaacgcctggataggcgccaggggtgtcgatgaaggtaatgatcggcattttgaaacgctcagccatttccatcaggcgcagcgctttgcggtagccttccggcgccggcataccaaagttacgacggatcttctctttggtttcacggcctttctgatgaccgatgatcatcaccgggcgaccatcaagacgcgcaataccgccgacgatagctttatcgtcagcataggcgcgatcgcctgccagctcgtcaaattcgtcgaaagccaggcggacataatccagggtatagggacgacgtggatgacgcgccagctgggctacctgccatgcgccaagatcggcgaagattttgcgcgtcagctctacgcttttttcgcgcagacgatgcacttcttcatcgatgttaatatccagtttctcatcctgacggcttacagcagtcagggaatcgattttcgcttccagctctgcgataggctgttcaaaatctaggaaattcagactcatagtattcctgtattagtcaaactccagttccacctgctccgagccgataaggccacgcagatcgttgagtaaacgatcgctcggagagacgcgccatgttgcgccaaaacgcaaccgcgcgcgcgcatccgccctctgataatagaggtgtactggaatggttcccgaacggtggggttccagagactgacggagtcggtttaaaagctggtcatcaatttgcctgtccgtcagcgagatagcaagcccgcgagcatatttttcccgggcttcgtcaatatccatgacttcacgggcggtcattttaaggcccccgctgaagtcatcaaagctgacctgtccgctgacgataagtatgcggtctttttccagcaactgctggtatttatccagcgcgtcggtgaataacatcacctccagacgcccggaacggtcatccagcgtacagatgccgatacgattgccgcgcttggtgaccattacccgcgcagcaataaccagccccgccgccgtggtcactttaccacgatcggttgggtgcatgtctttgagtctcacgccgccaacgtagcgttcgatctcttttagatattggttaatcgggtggccggtcagatatagccccagcgtttccctttcaccatccagcaccacctgctctggccacggctggcagctggcgtaggattgctcgatttgttccggctcttccgccagcacgccgaacatatccgcctgaccgatggcttcggctttggcgtgctgatcggcggctttcagcgcatcgttcagcgagttcatcagcgccgcacgatgcgggccgaggcggtcgaacgccccggacataatcagtttttccaacacccggcgattgagttttttaatatcggtacgggcgcacaggtcaaacagctcgcggaagtaaccgccattgttacgcgcttcaatgatggcttcaatcgggccttcgccgacgcctttaatggcgccgataccatacacgatttccccatcatcgttgacgtggaaatgatacaggccggagttaatgtccggcggcaggattttcagccccatgcgccagcactcatcgaccaggcccaccaccttctcggtgttgtccatatcggcagtcatcaccgccgccataaactcggccggatagtgggctttcagccacagcgtctggtaggagaccagcgcataggcggcggagtgggatttgttaaatccataaccggcgaatttctccaccaggtcaaagattttcatcgccagttcgccgtcaacgccatttttcctcgcaccttcttcgaagacagaacgctgcttggccatctcttccggctttttcttacccatcgcacgacgcagcatatccgcgccgccgagggtataaccagagagctcctgggctatctgcatgacctgttcctggtacagaatgatgccgtaagtcggctccagtacaggtttcagacattcatgctgccactgcacgtccgggtaggaaatctcttcacggccgtgcttacggtcgataaagttatctaccatccccgactgcagcgggcccggacggaacagggccaccagtgcgatcatgtcttcgaagcagtcaggctgcaggcgcttaatcagatctttcatgccgcgcgattcaagctggaataccgcggtggtttccgagcgctgcagcatgtcgaagcttttcttgtcatccagcggtatcgcggcgatatccagcggcccttcgccgttcttcgcccggcgcttgttgatcatctccagcgcccagttgatgatggtcagcgtacgcaggccgaggaagtcgaattttaccagcccggcatattcaacgtcgttcttatcaaactgggtaaccgggtgcagcccctgctcatcgcagtacagcggcgcgaaatcggtgattttggtcggcgcgataaccacgccgcccgcgtgcttaccggcgttacgcgttacgccttcaagcttacgcgccatatcgatcagcgctttaacttcttcgtccgcttcgtagatttccggcagctgtggttccgcttcaaaggctttcgccagcgtcatgccaggatccggcggcaccagcttagagattcggtcaacaaagccgtaagggtggcccagcacgcggcccacgtcgcgaataaccgccttcgccgccatggtaccgaaggtgatgatctgcgataccgcgtcgcggccatacatatccgccacgtgctcaatcacctggtcgcgtttctccatgcagaaatcgacgtcgaagtcgggcatcgaaacacgttccgggttgaggaaacgttcgaacagcaggtcgaactccagcgggtcaaggtcggtgattttcaacgcgtaggccaccagcgagccggcgccggaacctcgccccggccctaccggcacgccgttatccttggaccactggataaattccatgacgatcaggaagtagccagggaaccccatctggttgataacctgcagttccacatccagacgttggtcatattccgggcgacgcttagcgcgctcttcgggatccgggaacaggaattcgagacgctcttccagcccctctttcgacttcatcaccagaaaatcttcggtagtcatgtcgccggtcgggaactgcggcaggaagtattcgccaaggcgcacggtgacgttgcagcgtttggcgatctcaacggtgttttccagcgcttccgggatgtcagcaaatagctcgcacatctcctcctcgctgcgcatatattgctgcggcgagtagttacgcggacgcttcggatcgtcgagggtgaagccatcgtgaatggcgacgcggatttcatgagcgtcgaagtcgccggtttccaggaagcgcacatcgttggtcgccactaccggcaaaccatgctcttccgccagttgaaccgcggcatgaagatagctttcttcgtcctgacgaccggtacggatcagctccagatagtagcgatccggaaaatgttgttgatagaaggcgagacactgctctaccagcggcatatttccgcggatcaagctgacgccaacgtcgcctttacgcccgccggacagcagaatcagcccttcctgatgctcaaccagccagtcgcgatcgatccatggccccagcgcgccatagccgcgctgataggcacgagaaatgagcagagtcaggttctgatagccggtattgttggccgctaaaaccgtcagctcggtgaattcatcgccaagcagatcgcactgaacatggaagtcagcgccgacaattggtttaatcccggcgccatggcccgttccgtagaacttaaccagaccgcagaggttggtgaaatcggtgatcgccagcgcaggcatgcccaaagcggccgcctttttcaccagcggcccggttttcgccagcccatcgatcatggaatagtcgctgtgcacccgcaggtgtacgaaacgtggttcagacatctttagatcccagtgacttagttggacgccaggcccagcgcgcgtttcaccgggccgaaactacgccggtggtgctctgttgcgccgtgttcctgcagtttttgcagatgtacaacggtaggatagcctttgtgctgggcaaaaccgtattgcggaaatgcaatatccagcgtagccatttcggcgtcgcgagtgactttagccagaatagacgctgcgctgatttccgccacccggctatcgcctttcactaccgcctgcgacggcatcggtagcgatgggcagcggttgccgtcgataagcacgaactcaggggtaatactcaggccagcgacggcgcgctgcatcgccagcatcgtggcatgcaggatgtttagctcgtcgatttcatgcggctcggcgcgccccaggctccagcacagcgctttgtctttgatttcatcaaacagcgccaggcggcgcttttcgcttaattttttagagtcgttgaggcctacgatcggcttacgcggatcaaggattaccgcggcagtgaccaccgcaccgaccagcggcccgcggccgacctcatcgacaccggcgaccagatgggtatgtggataaacgaactccatcattttgctaactccagtactgcgtccgccgcctgctcgtccgcgttgcagcggatctgctgatgcagcgcgcggaaagtatcatgcatatcgtggctggttttgccgtcggccagcagcggcttcagagcggcggccagcgcctgcggctcgcattcatcctgcagcagctctttcaccaactcgcgcccggctagcagatttggtaaggagacataatcggttttcaccaaccgcttcgccagccagaaggtaaacggcttcatgcggtagccaacgaccatcgggcatttcgccagcatgcactccagcgccgccgtccccgaggccagcagcgcggcatcactggcgatcatcgcatcgcgcgcctgaccatccagcatatgtaccgtcatatccggcgccgtctcagctttgattcgctcaaactgttcccgccgtttggcattgaccagcggcaccacaacctgcaggtcgggataggtaccacgcagaagctgcgcggttttcaggaagtcggcgctgagcatttcgacctccgcgccgcggctaccgggcagcaacgccaggcagtgaacatcatgcgggatgcccagacggtcacgtgccgcgcccttatcaggatccagcggcatggcatccgccatggtgtggccgataaaacggcagggaacgttaaatctgtcgtaaaacgctttttcgaaaggcaggaatgccaggaccagatcggtggatctgccaattttgaaaacgcgtttttgtcgccatgcccaaacggacgggctgacgtaatgaatggttttgatgccctgctttttcaggttaccttcgagggtaatattgaaatcaggggcgtcgatgccaacgaagacatcgggacgcagttcaccgaagcggcgcgttaaatcggcgcgaatatgcagtaagcggcgcagtcgaccaagcacttcaacaatgcccatcacggccagctcttccatttcgtaccaggcttcgcatccttccgcctgcatcagcggccccgccacgccgacaaagcgcgcatcagggacgcgagctttgagggcgcggatgagaccggcgccaagaatatcgccggaggtttctccggcgaccagggcaatcgtcaggggacgctgttcggccattaacgaatcaagccgcgagttgaacgggcaaagaaatcgacaaatggctgaacttcaggatgctgagccgccagttcggcgatttccggcttggcttcgtccagcgttttgccactgcggtacagcagtttataggcgttacgaatcgcggtaatcgcttcacggctaaagccgcggcgtttcagaccttcgatgttgacgccaaacggcgtggcatggttgccctgggcaatcacgaacggcggaacgtcctgagcgacgccggagcagccgcctaccataacgtgcgcgccgatgatgcagaactgatgtactgcagtcatgccgccgatgatgacgaaatcatccagagacacgtgaccggccagcgtcgcgttgttggccaggatgcagcggtcgccaagcgtacaatcgtgcgccacgtgggcgttgatcatcagcaggttatcgctgcccaccttcgttaatccaccgccctgtactgtgccgcgatgaatggtgacgctttcgcgaatgcggttgcgatcgccaatttccactcgagtcggctcgccagcatatttcagatcctggttaacttcaccgatcgaagcgaactggtagatctcattgtcgcggccaattttagtgtggccattcacaacgacatgagacttcagtacggtgccctcgccaatttcgacgttggcgcccacaatacaaaacggaccaatgtggacgttagcgccaatgacggcgccttcttctacaatggcggtaggatgaataaaggcggttttatcaatcacgtatcaggcctcccggctacgcgcacacatcatcgtcgcttcgcaaaccactttaccgtcaaccagcgcaacgcctttgaaacgggtcaggccgcggcgggttttctcgaaagtgacttccataatcatctggtcgcctggcactaccggacgtttgaaacgcgcttcatcgatacccgcgaagtagtacagttcgcccggttcaagttttccaacgcttttgaaagccagaatgccggtggcctgcgccatcgcttccagaatcagcacgccaggtaaaatcggcttaccagggaaatgcccctggaaaaacggctcgtttacggaaacattttttactgcgcgcagaaaacgaccttcttcaaaatccagcacgcggtctaccagcaggaacgggtaacggtgaggcagaagttccagaatctcttcaatgtgcagagtatgagtgtcagtagtcaaaatactcttcctgtctaaatatactaaaaggcaataataacacggcctgcggcaatcttattaacgaatgcaacaggccgggaatgtaacgtgaccgaatgatgaatttagtcttgttgattaaccttgcgctcaaccgctttaaggcgcttgctcatctcgtcaatattcatcaccagcgccgcagttttacgccacgccttgttcggctgcagcggaatacctgaggaatagacgccaggttcagagataggacgcataaccatccccatcccggttacggtgactttatcgcagatttccatatggccgttaatcacgctggcgccgccaatcatgcagtaacgcccaatcttcaggctgccggccataatcacgccgccagcgacggcggtattgtcgccaatcaccacgttgtgcgcaatctggcactggttatcaatgataacgccattgccgatcacggtatcgtccagcgcgccgcgatcgatggtggtacaggcgccgatctccacacgatcgccaataataacgcgaccaagctgcgggatcttcacccagttaccgcgatcgttagcgtaaccgaaaccgtccgcgccgatcaccgtactggactggatcaggcaattttcaccgatctcaatctcgtggtaaatggtaacgttggcccataaacgcgagccggcgccgattttgctatttttgccaacgaaacagccagcgccgataaccacgttatcgcccagcaccacgccggattcgataacggcattcgcgccgacggagacgttgttacccagcttcgccgttgggtcgatcgccgcgcttgcggcgatgtcttgcgccggctgcggcgtggtatctaaaatttgagccatgcgcgcgtaggtcaggtagggattacgcactaccagcgcggcgctatgggcaaacggtaaatcgtccggcgtcatgacaacggcggaggcctggcaagcggccaggtgttcacggtatttaggatttaccatgaaagtaatttggcctgctttagcgctctgcatggacgcaacgccggtgatgacgatatcgccatcaccgtgtaattctgcatccaactgctgtgctaagtcagccagtcgaattgaaggcattacttatttaacctgtttcagtacatcagcggtgatgtctttaacatcgctgctgttgtatgccacggcattagagtcaacaaccagatcgatgctctgatctttcgctacgctctgaacggcagtctggatacgggtaaccagtttgccacgttcttcattggaacgacgtgcgcgatcctgctcaaaagcctgtgctttctgagagaaggtctgacgctgagacatcacgtctttttccagtttggtacgatctgcgcccggtttcatggactgcagacgctgcattttagactgcagatcgccttccatacgctgcagttcgctagcgcggcctttgaactcgttctccagcgttttggaaacgccagttttctgagcaacctgctggaacaggttattcatgttaaccagagcaattttatctgccgcctgagcggaagttaccattgctaaacccagacctgcagctaataaccactttttcacaattgactccttaccatcccatgagtacccaggggtaccgttatttgcgtggccaggcgatagcatccgccatcgcctacagtcagcgctatactgcacttacattccgttgtcgccgacaattaccaggttttaccaatgttaaactggaactgctcggctttgtctccatcgtactttttaaacggttgggcgtaggagaagaccaacggccccaacggcgacatccactgtaccgcgatacccgcagacatacgaatgttgcttggatcgctgtaatcagggtagccaccgtacttcgtggaatcccagttagtatcccagacggtccccatatccataaacacggaagtacgcaccgagttagcgtatttatcgctgataaacggcgttggggtaatcagctcgaggctggcgaccgccatggcgttaccgcccaccgcatcgtccgatttacaaggcgcgctttcagtgctcgcacattccgtatcatagtcatcacgactggtagttgaagggagataaaccgctttcggaccaatcgtattcgactggaagccgcgaacggtacttgaaccaccggcatagaagttctcatagaacggcatctctttaccgccgagtccatcaccgtaaccgaagcgcgtacgaccaagcacgacccactgatgatcgtcatcgatcggtacataggtcgcagtatccagcgtcactttgtagtattcgttatcagagcccggaatagtgactttaccgttcaggttgacacgcgaaccttcagtcgggaagtagccgcgatcgaggcggttgtacgtccaaccatagttgaaggtgaagtcgtcggcgctaaacgagttattatcgttagtggtatccgggtactgccccatcgaattcaggtaacgccacatcgccacctgcggctgcatattggacagggagttatgaacgtaacctaaacctgcgcgcagcgagttgtattcgttgatcgggaagccgagggtgacgtctgtaccatagcttttgttggtatagtcagacagatccgcgtcgttcgcatcgaagtcgttatagaagatgcggccgccgaggctcacgccatctacggtgaaatacgggttggtgaccgacagttcagcataggtctggaagtcgttcttggtcccgttaatgccaacagagtagccggtgcctaaccagttatcctgctgaacgcctgcctggaagctgacgccgctttcggtaccgtaaccgataccgaagttcaggctaccggtgttacgctctttcaccttgtaaacgacatcgacctgatccgggctacccggcacgcgctgggtatcggtatcgacggtttcgaaataacctaaacggttaagacggtctttaccctgatcgaccaggtcactgcccagccacgccccttccatctggcgcatttcgcggcgcaggacggaatctttggaggtgtcgttaccttcgaagcgaattttacgcacgtagtaacggttaccggcatcaacgttgatatgcagcttcacggttttatccgtgtcgttgatttccggctgcgactggacgcgcggataggcgtaaccatagcgaccgaggagtttcttaatatcattctccattttggtcactttggtgccgttatacagctcgcccggctcaattttggtcagcgattcgatttccgcggaatggcccgccagatcgcccgtaatctgcacgccggagagcttgtactgctcgccttcggtgatgtttacggtgatatagatgcctttcttgtccggcgtcaggctaacctgcgtcgaatcgatgttgaaacgcgcgtagccgcgatccagatagtaactgcgcagggtttcaaggtcgcccgccagtttctgtttctggtatttacgatcgccgacaacgttccaccacggcacttcatcgcgcagttggaagtgagaaatcagttcgtcagtggtgaaagcgtggttaccgacaatgttaatctgctggattttcgccgagacgccttcctggaaaaccagtttcaggtcgacgcggttacgcggcagcggcgtcacgacagctttaacgctggcgctatatttaccgacgctgtagtagaaatcttccagccctttttcgatatcggcaagcttggtgcgatcgagagattccccaacgcgaacgccggatgcctcaaggttttgcttgagcatgtcatccttcaccgacttgttgccggagaaggtaatgctcgcaatcgttgggcgctctttcacctgcaccagcagggtatcaccatcgcgcaggacgcggacgtcctcaaagttgccagtggcaaacagagcgcgaatggtgttactgatatcatcatcggtcaccgtatcgccaggacgcactggcatgctgaggagggccgcaccaacagcgacacgctgcaagccttcgaaatgaatgtccttcaccacgaacccttcagcaccgtatacagtcgcgctgctaaacagcagcgacgctatgagcaactttttcatcgccatcgttattatgcgttcttcctaacaaactctcttacaaccgagagaaatcattgaaaagtgcaagccccattaacagcaccagcagtattgagccaatgcgataactaaagtcttgaactcgctcggataccggtccgcccttcagcttttcaatcgccaaaaacagcagatgccccccgtcgaggacgggtagcgggaacaagttgattattccaaggttcacgctaatcagcgcaaggaacatcagatagtaaatcaacccaaattccgctgacattccagccccctgagcgatagaaatcggcccactgaggttgttcagtttgacatcaccggttatcaatttgcccagcatcctgaccgttaacgacatcagttgccaggttttatccgtggcttcggcgatggcggcaaacggcccgtactgacgcactgtcttgtattcatcaggcagcgggataacctttggtactacccctgcaaacccttcagccttgcctttcaccgacttcgtatccggagtcaaagtcaacgacagcggcgtaccttgtctgtcgacctccagagccagcgccttgcccggattatcgcgcaccagattaacaaacgtcatccactgcgttaacggttgaccatcgactttaacgatcctgtctcccgcttgcaaacctgctttctgcgcggccgactgaggttgtacctcagccagggcggtatcaatctgcgcgctatgcggcttgatacccagcgaggccaccggatcttgtttatccggctcaaacgcccagtgacgcagatcgaggattttatcctgacgttggttcgtcccgaaaggggcgacggtaagtattgtttgttggtcgccgatcttcgcgactaacgccatacgaactgcatcccaatcaggcgtttcgatgccatctatcgctttaagttccattccttttgcaatttgtgcttgcgcagctatggaattgggcgatatttcatcaacaaccggacgtacgccagggacgccgatgataaacaccagccagtaagcaaagatggcaaaaatgaagttggcgatagggcctgcggcaatgatggccgcacgctgaccgacggttttattgttgaacgcataatggcgtatttccggcgccactggctcaacgcgttcgtcgagcatcttcacatagccgccgagtgggatcagcgcgataacgaactcggtaccctgcttatccacacggcgccacaacgctttaccaaaaccaatggaaaaacgttcaacacgcacgccgcagcgacgagccacccagaaatggccgaactcgtgcacggtgatcagtacgccaagcgcaataataaaagcggccaaattccagagaacgctcagcataaaaccttccgtcaaatcgtcctgaagactaacaacagcagacaagcgaacaccggcaccgcagccgtcaggctatcaatgcgatctaaaataccgccatgtccagggatcagatgcccgctatccttgatgccggcttcacgcttaaacatactttccgtcaaatcgcccagcactgaagccagcgccgccaccaccgagcaaatcagcaacacagttggggtgacatccagatgagcccacatgccgtacgcccaggagataaccgcggccgtcagcaggccaccgaagaaaccctgccaggttttccccggggaaacctttggcgccagcttatgcttgccgaacattttaccgaacatgtaggcgccggaatccgcgccccacaccagaatcatgacgtacagcagccacaccgcgccgctatagtggttatcggcataatgccaggcccgcagcgccagcatgccccagaaaaacgggacaatagtcagcacgccgaagataagacgcagcgctttcgaatgacgccacaacgccgccgaagccggataagagagtaccagcaccaacgcgacaatccaccagccaaacgaagcccataacgatccctcaaccatcggttgatgagcgtcatagtgatattcgggcaacataaagagcattagcgccagcagcaggccacaaagcaccgccagccacacgcgctgcgtcgttgaggtgaaaccgcttaattgcccccactcccacgcggcgagcatacaaacgaccagtgtgacaatagcaaagcccgcgggcggcaatagaaaaagcgccgcaataacgacgggaattaaaacgaaagcggaaatcaggcgatacttcagcaaaagtgacccccatcaggcatgactgccacccggctcttctgtgccgccaaaacgacgctctcgactaacgaatgcatggagtgcaccttcaaagtcctgttcagcaaaatcgggccaaagaacatccgtaaagtaaagttcggcataggcaatttgccaaatcaaaaagttacttattcggtgctctcccccggtcctaataactaaatcgacgggagccagttcatgcatacacacttgctggctcagcaactcttccgtgatctcttcaggttttagcaacccgttttgtacctgttctgccagttgacgcgccccctggacaatatcccagcggccgccgtaattagcggcgatattcagcgttaaccccgtattgtttgccgttaacgcttccgccttacgaatgcgctcctgcagtcgggcattaaagcgtgtcgtctcgccgataatccgcaggcggacattgtgacgatgcaggctttttacttcgctatccagggcccagacaaacagttccatcagcgcgctcacttcctgcgccggacggttccagttttcactactgaatgcgtaaagcgttaatgcttcaataccattattcgccgcgaaggagaccgcgcgacgaacagatttcgctccagctttatggccaaaggcgcgaattttaccttgttgtttcgcccaacgaccgttgccgtccatgataatggcgacatggcgacaaccatgcgcaggcgacattttgctgacagtttgattagcagacaacataacgcgttttaagtccataataaggattagctaagccacaacacacacgccgccgggcagcgctgaatacgcatttttatccggcgccggagctacagccaatcgcagagaacaaccaaaagctttacgcaaaaaagccgtgtcttgccacggccaccgtaatctttcacaacaaaatgcaacgatcgggtggcgcagactatatcaccgaagcccagcgcccacaaatatcacaacgcgttacaggggctcccctacgccatgtgttatcggagttgtcgctgtgcggcgacgcgcgcttcggcatcaatcgcaaccacttcatcaatactttgcggttcattgagcgccatactatccagcaccgcctggttaaccgccgcaatatcggtaaagcggatttcgctattcagaaacgccgccaccgaaacttcgttagcggcattcaacgccgtcgtcgcggcttggccgacatcaaaagcgtccattgccagcttcaggcacggatagcgatcgtaatccggcgctgaaaaactcaggttgctcaattgacagaagtccaacggtttaacgccggagttcaggcgctgaggccaacccatggtatgggcgatcggcgtgcgcatatccggctcgcctaattgcgccagcacgctgccgtcctgatagcgaaccatggagtgaatcaccgattgcggatgaataatgacttccatctgctgagcagaggcattaaacagccagcgggcttcgatgtactccagccctttattcatcatcgtggcggaatcaacggaaattttgcgtcccattgaccagttcggatggcggcaagcctgatccggcgtcattgccgccagctcagaaatcgccgtttcccggaaaggaccaccggaaccggtcagcagaatcgacgagacgccgttctgcgtcaggtcagcgtatcccagatggttttgaattgtttccggcaaactctgaaaaatcgcgttatgttcgctatcaaccggcaacaggcgagcgccatactgctgaaccgcgtccataaacaggcggccgcaggtcaccagcgactctttattcgctaacaacaccgttttgccagcgcgaatggccgccagcgtcggcgccagaccggccgcgccaacgatggccgccatcacctgatcgacttcatccagcgccgcgacgtcggccgccgcctgcttaccgctcagcacttccgtgcggcagccctgttcacgtagcagcgtacgcaaacgctcagcgcctttgcgcttcatccatcaccgcaaagcggggggataattcccagacattgttcaaccatacggtcgacaattttccccgcgaccagcgcggcgacggaaaagctttcgggattatggcgcaccacgtccagcgtgctgcagccgattgaaccggtcgaaccgagaacggttaattgcttcatgagacgtccagaagaattgtgacaggataaaaagcaaaacgccgccagcaagccctttatgcatcaatcctcggggctaaaacggcggcgaatgaccttcggtatagaacggaaggctacaaggccagctattttaacgcaatcccaaatattgagcgtacggtcttctgtacggcgtttcagactttacgcagccccgaatatcccgggcccgcgtaacggcagaaaatcagaactgcatcagttccgcttctttctctgccagcgccgcatcaactttcttaatggcggcgtcagtcattttctgcacgtcgtcctgagaacggcgatcgtcatcttcgctgatctctttctctttgagcagagctttaactttgtcgttcgcgtcacggcgaacgttacgcacggcgacacgcgcctgctcagcttcgccacgcacgatcttggtcagatctttacgacgttcttctgtcagcggcggcagcggaacgcggatatcgctacccgcagagcttgggttcagacccaggtcagacgccataatcgctttttcaacggccgggctcatagagcggtcgaagacgttgattttcagcgtacgggaatcttctaccgtaacgcttgccagctgacgcagcggagtcggcgtgccgtagtattctacaatgatgccatccagcaggcttggagaagcacgacccgtgcgaattttgctgatttggtttttgaatgcttcaacgcatttttccatgcgtacttcagcatcttttctgatatcgctaatcacgttacgaatccttgaaaacttgtctcagacagaccacacggtcgctcaccgcaaaagtgagctaagtatagtccggattaattcaattaaccgggcaacttccccgctaaagtaaagcggaatattacccggaattagcgccgacgggaattattccgtaatcaatgtgccttctttttcgcccatcaccacacgacgcagcgcgccaggcttgttcatgttaaatacgcgaatcggcagtttgtggtcgcgcgccagggtgaaggcggcaagatccatcactttcagctctttatccagcacttcgctgtaggtcagctgatcatacatggtggcggaaggatctttcgccgggtcagcggtaaacacgccgtcaaccttggtcgctttcagtaccacgtcggcttcgatttcaataccgcgcaggcaggctgcggagtcggtagtaaagaatgggttgccggtacctgcggagaggatcaccacgcgattgttacgcagcaggctaatcgcttccgcccagctgtagttgtcacacacgccattcagcggggattgcggacatcaggcgagcgttcacataggcgcgatggagcgcatcacgcattgccaggccgttcatgaccgttgccagcatgcccatgtggtcgcccacaacgcggttcatacccgctttcgccagaccagcaccacggaacaggttaccgccaccaatcactacgccaacctgaatacccagttcaaccagttctttgatttcctgagccatacggtcaagtatgcttgcatcaataccgaagccttctgaaccctgcagagcttcgccacttaacttcagcagaatacgtttgtagacgggttttgcattggtagccatgtttctttcctgagactgtcaacgattgagatgagttaattctgacgacattgtatgtcatcgttcagcgcagtcactataagcgattggctgattttacaagagaggcgcaaaaagaagccgccctcaggcggctcctttttttaaaaattaagactgcttggacatcgcagcaacttctgctgcaaagtcagtctcaactttctcgatgccttcgcccacttcaaagcggatgaagccagtaacgtcggcgttgtgctctttcagcagctgaccaacagatttgctcggttccataacgaaaggctgaccagtcagagaaacttcgccggtgaatttcttcatacggccttcaaccattttctctgcgatttctttcggcttaccggactgcatcgcgatgtccagctgaacctggtactctttttctactacttcagcagaaacgtcttccggcttaacgaattccggcttgcttgcagcaacgtgcattgccagctgcttaaccagctcttcgtcagcgcctttagcggcaaccagaacgccgatgcgcgcaccgtgctggtagctgcccagaacgtcgccttccaggatagcgatacgacggatgttgatgttctcaccgattttagcaaccagggcaacacgttcttcttcgaactgcgctttcagaacttcaacgtcggagattttaccagcaacagcggcgtccagtactttgtcagcaaatgcctggaaaccaccatctttagcaacgaagtcagtctggcagttaacttccagaatgtaaccgtagttgccgtcgattttggttttgatcacgccgtcagcagcaacgttgcctgcttttttcgccgctttgatcgcgccggatttacgcatgttttcgattgccagctcgatgtcgccattagcttcagtcagtgcttttttgcaatccatcatgcctgcgccagtacgttcgcgcagctcttttaccagggaagcggtaatttcagccattctaaaatcctcgggagatgtggaaactgcccggcctgcggccaaacagcataaattgaaaaaaggggcctaaaattggcccctattcatacacggtactaataagggcttaaaccttattattcagcttctacgaagctttcttccgcctgagaagccaggtcctgagagcgaccttcacgaacggtagctgcaacagcgcccaggtacaggctaactgcgcggattgcatcgtcgttacccgggataacgaagtctacgccgtccggatcagagttggtatcaacgatagcaaataccgggatacccaggttgtttgcttctttgatagcgatgtgctcgtggtcagcgtcgataacgaacagtgcgtccggcaggccgcccatgtctttgataccgcccaggctgttttccagcttgtccagctcacgagtgcgcatcagcgcttctttcttggtcagcttctcgaaagtaccgtcctgggactgagtttccaggtctttcagacgtttgatggactgacgaacggttttccagttagtcagcataccgcccagccagcgatggttcacgaagaactggtcgcagctgttagcagcttcttttaccgcttcgcttgcagcgcgcttagtaccaacgaacaggatcttgcctttacgggcagagattttgttcagctcagccagagcttcgttgaacatcggtacagttttctcaaggttgatgatgtgaactttgttacgcgcgccgaagatgaaaggcttcattttcgggttccagtaacgggtctggtgaccgaagtgaacaccagccttgagcatgtcgcgcatggaaacagttgccatgtttaaaacctctatagattaaattggggttatgcctccacgtatcccatattaccgaccccaaagggcaccccggaatatgtgccgatacgtgtgtgttatttacacaatatgagtatgtcgcttacgcccatccttgtgtatctgagatggaacggaagtccggcgcgctttataccacaaaacctggccagacaccaactcttgttgacgtctcgtgctgttaatgattctcaatttggcaccagcgtacccggactgttaccattgacaggacttaatctattattgtcgaaaaaatcgacactgctggacatattccatggctatctctatcaagacatctgaagacatcgaaaaaatgcgcgttgccggccgcctggccgccgaagtgctggaaatgatcgaaccctacgtcaaaccgggcgtcagcaccggcgagctggatcgcatctgcaacgactacattgttaatgaacagaaagcggtctccgcctgcctcggctatcacggcttcccgaaatcggtctgtatctctattaatgaagtggtgtgccacggcatcccggatgacggcaaactgctgaaagacggcgacatcgttaatatcgacgtgaccgtgattaaagatgagttccacggcgatacctcaaaaatgttcatcgtcggtaaaccgactatcctcggcgagcgcctgtgccgcatcacccaggaaagcctctatctggcgctgaagatggttaaaccggggatcaacctgcgcacgatcggcgcggcgatccagaaattcgttgaagcggaaggtttctccgtggtgcgcgagtactgcgggcacggtatcggccgcggcttccacgaagaaccgcaggtactgcactatgattcgccggaaaccgacgtggtgctcaaggcgggtatgaccttcaccatcgaaccgatggtcaacgccggtaagaaagagatccgtagcatgaaggacggctggacggtgaaaaccaaagaccgtagcttgtctgcgcagtacgagcatactattgtggtaaccgataacggctgcgaaattctgacgctacgcaaggatgacaccatcccggcgataatctcgcacgacgaataatgaaaagccggcgcccgccggcttttttattagatagttttttcttatggtgacgcgatgagcaactctttacctgacacagcctcccctcttctgcccatcccgccggaacatccggtgaactggccgcagggcgatctgaactgtgccgcaatcaaggcgcacatcgataccttccagcactggctcggagaggcatttgataacggcatcgccgcagagcagctcatcgcggcgcgcaccgagtttatcgaccagctgctgcagcggctgtgggtcgactatggttttgaatccgtctgcgacctggcgctagtggccgttggcggctatggccgcggcgagctgcacccgctctccgacgtcgacctgctgattctgagccgtaaaaagctgccggacgagcaggcgcaaaaggtcggcgagctcctgaccctgctgtgggacgttaagctcgaagtcggccacagcgtgcgtaccctcgaagagtgtttgctcgaagggctttcagatcttaccgtcgccaccaacttaattgaatcccgcctactcatcggcgacgtcgcgctgttccttgaactgcaaaaacatatttttagcgacggcttctggccgtcggaaaagttcttcgccgccaaggttgaagagcagaatgttcgccaccagcgctaccatggcaccagttacaacctggagccggacgtcaaaagcagccccggcggcctgcgcgatatacataccctgcagtgggtggcccgccgccacttcggcgccacctcgcttgatgaaatggtcggcttcggcttcctcaccgaagccgaacgcaacgagcttaacgagtgcctgcaccagctctggcgcatccgttttgctttgcaccttgaagtgaatcgctacgataaccgcctgcttttcgatcgtcagttgaatgtcgcccaccgcctcggctatgaaggcgaaggcaatcagccgatcgaacacatgatgaaagatttcttccgcgtcacgcgtcgggtgagtgaactcaataacatgctactgcagctgtttgacgaggcgatcctcgcgctaaccgagaacgaaaaaccgcggcctattgatgatgatttccaactgcgcggcaccctgatagacctgcgtgacgacaccctgtttatgcgcgagccgcaggcaattctgcggatgttctttattatggtgcgcaacagcagcatcaccggcatttactccactactctgcgtcacctgcgccacgcgcgccgccacctgacgcagccgctgtgctatatcccggaggcgcgaactctcttcctcagcatgctgcgccatcagggcgcggtgagtcgcggcctgctgccgatgcatcgccacagcgtgctgtgggcctatatgccgcagtggtcgcatattgtcggtcagatgcagttcgacctgtttcacgcctataccgtcgacgaacacaccatacgcgtcttgttaaagctggaaagcttcgcgaaagaagagacccgcagccgccatccgctgtgcgttgagctgtggccgcggctggcccatcctgaacttatcctcatcgccgctctgtttcacgatatcgctaaaggccgcggcggcgatcactcgattctcggcgccgaagacgtgctgaaatttgccgagctccacgggctcaattcgcgggagacgcaactggtcgcctggctggtacgccagcatctattgatgtcggtaaccgcccagcgccgcgacattcaggacccggaggtgattaaacagttcgccgaagaggtacagacggaaaatcgcctgcgctatctggtatgcctgaccgtcgccgatatctgcgccaccaacgaaacgctgtggaacagctggaagcaaagcctgctacgcgagctctatttcgccaccgaaaaacagctgcgccgcggtatgcagagcacgccggatatgcgtgaacgggtacgccaccatcagcagcaggcgctggcgctgttgcgcatggacaatatcaatgaagaggcgctgcaccagatttggaaccgctgccgggcgaactactttgtgcggcatacgccgaaccagctcgcctggcacgcccgcaacctgctgaagcacgatctcagtaaaccgatgatcctgctgagttcgcgggccacccgcggcggcaccgagatcttcatctggagcccggaccgcccttacctgttcgccgccgtctgcggcgaactggatcggcgcaacctcagcgttcacgatgcgcagatcttcaccacccgcgacggcatggcgatggatacctttatcgtccttgaacccgacggcagcccgctttccgccgatcgccacgaggcgattcgccacggtcttgagcagacaataactcaacgcagttgggagccgccggccccgcgtcgccaggcggctaaactacgtcatttttccgtcgccactgaggtgaattttctgccgacccataccgaccggaaatcatttcttgagctcattgcgctcgatcagccagggctgctcgcccgcgtcggtcaggtgttcgccgacctcgggatttcgcttcacggagcccgaattacgacaattggcgagcgagtagaagatttatttataatcgccaccgccgaccggcgtgcccttaataatgagctgcaacaagaagtgcaacaacggttgacagaggccctcaatccaaacgataaagggtaacgtattttttttaagtgaatggaaagaaacaatgcagcagttacagaacgttattgagtccgcctttgagcgtcgcgccgacatcacgccggcaaatgtggataccgtcacccgcgaagcggttaaccaggttattgccctgctggattccggtgcgctgcgcgtcgctgagaagatcgacggtcagtgggtgacgcatcaatggctgaagaaagcggtactgctctctttccgtattaacgataaccaggttatcgatggtgcggaaagccgctacttcgataaagttccaatgaaattcgccgactacgatgaagcacgcttccagaaagaaggcttccgcgtagtgccgccggcggcagtccgccagggcgcgttcatcgcgcgcaataccgtgctgatgccgtcctacgtcaacatcggcgcttatgttgatgaaggcaccatggttgatacctgggccaccgtcggctcttgcgcgcagatcggtaaaaacgttcacctgtccggtggcgtaggcatcggcggcgttctcgagccgctgcaggctaacccgaccatcatcgaagataactgcttcatcggcgcgcgctctgaaatcgttgaaggcgttatcgttgaagaaggcgcggtgatctccatgggcgtgtacatcggccagagcaccaaaatctacgatcgcgaaaccggcgaagtccattacggccgcgtgccggcgggctcggttgtcgtttccggcaacctgccgtcgaaagatggtaaatacagcctgtactgtgcggtgatcgtgaaaaaggttgatgcgaagacccgcggtaaggtcggtatcaacgaactgctgcgtaccatcgactaagcagaacaaaaagcgggagatatcccgctttttttatatctgacgctggcgaagatgaattttttcgttaattattcaatggttatgatgatatcaaaggtaccgttatgtacgataatctgaaaagtcttggcattaccaatcctgatgaaatcgatcgctatagcctgcgccaggaagctaacaacgacatcctgaagatctatttccagaaagataaaggcgaattcttcgctaaaagcgtgaagtttaaatacccacgccagcgtaaaaccgtggtcgccgacggcgtcggtcagggctacaaagaagtgcaggagattagtccgaacctgcgttatgtcatcgacgaactggatcagctctgccagcgcgatcgtactgaaatcgacctcaagcgtaagatccttgacgatttacgccatctggaaagcgtcgtcaccaataagatcagtgaaattgaagccgatctggaaaaactgacgcgcaaataaatccgcctgctacgggccagctactggccctcttccccgactccatcctcaattttgtcacccgtagatcatcttcaccatcagcgaaactcagttagccctcactaatatcatttcacatcacaaacatatctatatgaattacttaatttttccatttcatttatgttcaatttccacctaaaaggagatcaagctatgacacaggaaattgaacaaaaatgttataccctacaatccgccagctggctggataacgcaggttttgaaaaaggacgaaaacacgatcgtcaggcgctgggctttattctgcccgccaatacggtgctgaaaattcggcaaaccgatctcagcaacggcatctcgaccctgcgcctgatgtgtgatgatagcgctgtggaaaaatccagcgctttgaccaccaactggacaacgattagcaccaccgtcgattccgtgccgtttgtcgatacgttgtttaccgacagcccctgcgagttttccgtgatttaccaacaacccgcggcgacgaaaccgctcccctgctggaaatcaggacagtctgaagagacgtttttcctggactgggagaataataaatcgtctttcgcgctggtagatctggatgttatcaacctgctgctgccctacgccgaccgcgacaatgcgatgaaagcgggattagcggcgctacaccgtttttataaccaccttttcaccagctataacgattgggccggactaagcgaaaatcccgattcgcaatggaatcagaacgttgccaaccgctactttttgcgggcggataaacatggcgtcggttcggcttattataataccaactggtgcgcgcagaccgccgccacggttggcgaaggctggctgaataacgtcgccacgcagtgggttatcctgcatgaaatcggccacggctatcagggtaaatttatgcaggatcccacgctttccgtcagcgaagtgtggaacaatatttacgcttccttctatcaacagctcacgctgagtcaggataatcatctgtataccgatggctggctatacaactacggtaagctggccgcgcaggaagcacagttggttaactatattaccgacaagacgccggtcaccagttggggtttgcgttctcgcctgcaattcctgatgctgatgttattcaaagccggtatcgcatccttccgcacctttaatcagaactatcgccaacttgccaatagcgagagcttccagccgtcggatcatcagcttgccgatatgctggcaaccgccatcgctacctccgcgggatatgatgtgacgccgtttatcgagctctgcggtttaacgctgaaaaacgccacccgggaaaatatcgtctcgctggcgacaaaaccgctctatccgctgtatcgttttctgccgcaaagcgaatgggatagcgcgcgccaacagttagggctggattccttcttctggctggtggataacagcgaactggcaatattaggcaaaacgggggcgctgaccctgacgctgaatatcgatcgcccggagcaaatttacggtcagacgctggctatcaaggataattgcggcaaccattattcactggtgattaatagtgacgtcctgaccctgaaggacatgccaatcggcgtgtatcaggtcgaactgcctaaaggccgctcgcaaaaatatcgcccggatatcagctatatcaccgtaaaagaaggcgccaatacggtcaccgtcaactacgttcagcaaaacgataccagcgaacgtaacgtgacgatctcctttttaggttatagcgatgcgccttttgcccacctggatgttgattacgaaaaccagcagcttattctcaatgtgaccagcgccaccccgcacagctactaccccgggacattgtatgccgcagtcagtgtactctccgccaacggtgaaaaagtgtttgagcgtaagatgaccggcaccaactgcgcgacgggtaaagtgattattccattcagccctcactatcacttatatatcacccacatggagccgggacggctgaaaacctcaccgggatatttaacgctggtcgcgcgtgagaaataccaactgatgcgcattgatgataatggtctgtataactttattctcggcaatagtcccgcggatgacttagaggcgattttcgagcataacgctcaggctatccgtactcagccctcgctggtagcgcaggaagagtgcgtctgtaaaaacgatctttggctgatgctcccccatattgaagagccccggcgcagtgaactgcttaaagcgtatgccgatgtcctgcctcaggataataacgatccgggcgagctaacgggcaaaagcgtgacgctcaatctccgcggccagggcaataacgagttttgccaggtcgttatcgataataaacaacgcgcaatgacggtcgcgacacgggccggcacaccgcactcgtattacaccacccatacctatgccagcattacggttaccgccgaggacgatgcggtcgtctatcaacgtagctacgctggcgctaccaacaatctggcaagcagtgaaaccatcgccctcgcggaaggaatgatcatcgatattttccatgatgaaccattccgctccagcgccactaatggcacgacgcagaacgccgtcacgctgacacagcataatcgctggcgcgtggtgaaagcgggcctcgaagtctatacgctcacgcctgataagccggatgaggaagccactgatacagaagaggaaactcaggaggccaccgcactgtatggcgatcgcttcagttggcaactgcttggcgatgatgatgtttgctttgccgggatggagatggatattggcagcggcgcgttgacctttagcgccaatgcggtggtaccgaataagcactttacgaccacttacgccacggtcaatgtctacaatacgcgtggttcggtggtgtatcgccagtcgattaaaggatcgtcgcagcttggcgactatgttgataccgccatcctggatgagggctataccattgaagtcttccatgccgaagcgggaaatcgttccgttattattaatccactcaatggcaatagctggcaacaacccaataccgtcacctggcaagtgacaacccgcgggctgcagcgcttgtaatccgtcatttccactcccgcctgaggcgggagtgtgtcagcgttgctcatccagctgcaatgcaatgtacagtagcagacggtcgtcaaaacttcccaggtccaatccggttagttccgaaatccgattgagccgatactccagggtattacgatgaataaacagcgcctttgaggtggccaacggctgcacgttatgacgaaaccatgcctgcaaggtgcggcgcaacaggccgttgttatccatcgccttcagccgcgtcagcgggcgcgccagctcattggcctgccagccgccgcgcaggctatccagtagcaccggcagcatcagatcctgataaaagtagctgcggctttccggcatccgctgcttccctaccatcatcgtcgtacgcgcggtccgataagagcgtgcgatactgcccggaccagtaaagaaattacctaacgcaacgcggaactgtagctggccgttctctttcatacgggcaatcagttgctcaacgcgcttgcagtggtcgtcggcgtcccagcggccaaaggcatttaacgcgggtttcaataccaccatctcggtcaacgagacaatcgccaccaggttgttgcgatccggcgtggtcagcgctgtctgcaactgctgtagttccgccatcgcgctatcgacgccaagctggccgctatcaacttcaatcatcgccaccacccgtggttgattgaggtcgatgcccagtctctgcgcccattcgttaagcgccggggtattttcttccgcctgaatcaggttcatgaccagttcttcacgcaggcggctgtcctgcgccagcagatgcatcagccgcgactgttcgagcatcatctccgcggtcatacacaccagctcaccatacttacgcagcgattcgggctcgccggttaatccgataacgccgacgatttccccttcaagacgcagcggcaggttaatcccctgacgcacgccgtgcagatggcgagcgaccgcatcatcgatatcaaccacccgcccctgcgacaacaccagcagcgcgccttcgtgcaattcaccaatacgctcacgatcgccgctgccaataatgcgcccgcgggcatccattacgttaatattggtatcaatgatgcgcatcgttcgcgccacgatatcctgcgccattttggtatcaagatgccagccagccatgtaaccctcccctgagcagggcatcagcataaaagagtgtctgaaactacacactgtgcatatgcacaaagcgtgacagagaagtatggagttgtggggggaatcacagaacttgcgggcagaataaaaaaagcccctttcccggcacgggaaaggggcttatgcgcgctgatagattattgcatcagcaggtagatagaggtatcaccacgcttaatattcagcgccagtacggacggttttgcatcgaagattttgcgcaggtcagcgatgtttttcaccggctgctggttagcgccgacaatgatgtcgcctttcttcagaccaatctgcgccgctggcgtgcccgctttcacgttgctcaccaccacacctttgtcctggcccttgttgctcatttccgcgccttgaattccgttaaagatgctgctggagtcaacctggttctgattgctctgctgcagttcaacggtaacgttgaccggcttgccgtcgcgcagcaggccaagctcgactttgctgccgataggcatcgtaccgacctgcgcacgcagcgccgcgaaactgctgatcggcttgccgttcagggtggtaatcacgtcgccagctttaatacccgctttcgccgccgcagagcccggcatcacctggcttacaaacgcgccgcgctgggcatcaactttcattgccttcgccagctcggagttcagctcggtacccatgatccccagttcgccgcgtttcacctggccaaacttgaccatctgctcggtcaggtttttcaccatgttgctcggaatagcaaagccgataccgatgttgccgccgtccggagcaaggattgcggtgttgataccgatcagttcaccgttgagattcaccagcgcgccgccggagttaccgcggttaatagccgcatcggtctggataaagttttcatagttttccacgttcaggccgctgcggcccaatgcggagacgataccggaagtcacggtttcgccgaggccgaacgggttaccgatcgccacggtgtagtcgccgacgcgcagcgcgtcagagtcggcaagcttaatcgccgtcaggtttttcggatcctgaatttgaatcagcgcgatgtcggagcgcggatctttaccgacgactttcgcatcgaacttacggccatcgctcagctgaactttaatcgtggtggcattatcgaccacgtggttattggtcaccacgtagcctttggccgcatcaataattaccccggaaccgagcgccataaatttctgctgctgcgcgttatcgccaggcgcgccctgaccgccgccctggcagaatggagagctctggaatggcgaaccatcctggcaaaacggcgagttgtcaccgaagaattgctggaagttacgcggcatccgcggcgtgttaacagtcgtgctgccctcgacgttgatgctcaccacagacggcatcactttttccagcatcggtgccaagctcggcatctgctgcgcagtggtcgccgaggaagccgtttcagccgcgctcgcagagagcggggacaacgccagacctaaactcagagccagagcactcattgctaacgtggtttttttcataggtttcaatctcaatttcaaatttcggataacgaaaaagttgctgtgtacgcactctcagagtcattttatagcgcgaagttccagagttaagtttcggtaaaagtaaaaatttattgtccgtctttacaaaactcagacttattccaccgccatcagacggcgatattcatcccacgcatacaaatccgtcattccgctgatatagtcctgaatcaatcgacagcggtaataatactccagcacgggatattcttcggcatcacgcgaaagcttatttaccgcctccacataagccaaccgatgtcgggtcgaaagtttctggaacaacctcgaagcaataggcaaactgcgtacccgatcttgttccaccaattggctgaactcctccagcgataatttcagtagcggctcgtagatatccagcagaccgctgataacccgatagccctgtaattccagctgttcaacatcaggatgactaaacacctgttttatggcgacgtttttataaagttcaagtagctgactacaatcgctgtcgtcctctaacagcgcatgattaaaatcgccgctaaaaatagccggtaagttttcgataaaccgatgcgccgcataaggcaccagtttattcaacgtattaacccgtaaatacataaagaactgatcttcagtgctgcggctcagtgaatttgcgcgcgatttctcccacgcgttttctacaacctgggcgaacaacgatcctttttcatgagtgccccacgcgtcatacagatgctgatacaattgctccgcgctgaatattcgtttttctaccgcatcttcgaggtcagcaacgcaatatgagatatcatcggcagcttccataatccacgttaatggaaaacgattgtaaggcgccagatccaattctttacgcagccgcgcgatatactcttcttcggctaaataataaccaggctttttcattaagtagctatggctggcaagcgtctctccccgccaccacgccggccgcgtatatttcagaatgcagccgacctgggtccaggtcaggttcatacgcatcagcgtatgcaccagacggatgccctgagcattgccttcaaagcagcacaaatcctgacgcactttacgccgcagttcgttgagcaccccttcgccgtcgtgcagacgcagcgcgtcaacctggcagcgatcctggcttaacggctggctggcggcatctttcggcgccagccgttttctgaaccaatcgttaattgccgcctcgccaaaatggccaaatggcggattgccgatatcgtgcatcagacaggccatctccaccacgctttcaaacgggccgctcagttcatccagaccgtagcattccagcagcttttgctctttcaggcggcttagcacctctttggcgatgtagcgcccgacctgctggacttcgagcgaatgggtgagtcgggtgcggaccgccgcgttacgctcaagtggaaagacctgggttttttgctgcaggcggcggatggccggtgaattgataatgcgcccgcgatcgctttcaaacacccgcaggatctcgcgttccgtctctacaccctgcggcgaacggtagcgccgacgccagtgaatcttgttgcgaaaatcaatatttgccatagcctctcccgcgcgagcaatacgcttccccttaagcgcatgatagactatgcagctaatcctgacacatcgcgagtaaatctatgaaaattggcattattggcgccatggaagaagaagttacccttctgcgcgacaaaatcgagaaccgccagactatctctatcggcggtagcgaaatctataccggccaacttcacggtaccgaggttgctctgctgaaatccggcattggtaaagtggcagccgccatgggcgccaccctgttgctggagcgctgcaagccggatgtgattatcaataccggttccgcgggcggtctggcgccgacgctgaaagtcggcgacatcgtggtctctgacgaagcgcgttatcatgatgccgacgtcaccgcgttcggctacgaatacggccaactacctggctgtccggcgggtttcaaagctgatgacaaactgattgccgccgcggaaacctgccttaaggcgctgaatctcaatgccgttcgtgggctgatcgtcagcggcgacgcattcatcaacggctcggtagggctggcgaaaatccgccacaacttcccgcaggccgttgccgtagagatggaagcgaccgccatcgcccacgtctgccataacttcagcattccctttgtggtggtgcgcgcaatctctgacgtcgctgaccagcagtcgcatctcagcttcgacgagttcctcgccgtcgccgccaagcagtccaccctgatggtggaaaacctggtgcagaacctggcgcgtggctaagtcgctacagaaagcgttaaccgccctgctgttactcgccccggcgtggcttttcgccgcgccgcgggtggtgacgctctccccggccaacaccgaattggcctttgctgccggcattacgccggtcggcgtcagcagttattccgactaccctcccgccgcggcgaaaatcgaacaagtcgccagttggcagggaatgaaccttgaacgtattgtcgctctgaagcccgatctggtgctggcgtggcgcggcggcaatgccgaacgccaggtgaatcagctcagttcgctgggaatcaaggttatctgggttgaaacgggttcaattgagcaaatcatcagcgctctgcggatgctggcgccgtggagcccgcagccggaaaaagcccgtcaggccgcgcaggcgatgcaagacgattaccaggcgctaaaagcccgctatgccaacgcgccgaaaaaacgcgtatttctgcagtttggcgccaacccgctgttcaccagcaacagcgcctcgatccagaatcaagtattgagcctgtgcggtggggaaaatatttttgccgccagccgcgttccctggccgcaggtcagccgcgaacaggtgctgtcacggcatccgcaggcgatcgtcatcaccggcgacgccagtaaaattcccgccgtggaccgctattggcaaaatcagctcacaatttcgctcatcgccttacatagcgactggtttgaacgcgcgggcccacgtattatccttgccgcaaaacaactctgtactgcgcttgagcaggtaaaataaccgcctggcagcaggcttttagcgggaactgacgatgcttgtctattggctggatattattggcacagccgtatttgctatctccggcgtattgctggcaggaaaattacgcatggaccctttcggggtgctggtattaggcgtggttaccgccgtgggcggcgggaccatccgcgatatggcgctggccaatggcccggtgttctgggttaaggatcctaccgatctggtggtagcgatggtcaccagtatgttaacgattctactggtccgccagccgcggcgcatgccgaaatgggtactgccggtgctggatgccgtcggcctggcggtgtttgtcggcatcggcgtgaataaagcctttattgcccataccggcccgctggtagcaatctgcatgggcgtggtcaccggcgtcggcggcgggattatccgcgacgtgctggcgcgagaagttccgatgattctgcgcaccgaaatctacgccaccgcctgcattgtcggcggtatcgtacacgcgacggcgcactatacctttcagctgtcgctggaaaactcggcgatgtcaggcatgatggtgacgctggtaatacgcctggcggcgattcgctggcacctgaagctaccgacctttgcgttggatgataacggacgttcataaaagcaaaacggtaaccttgaggttaccgtttttcgtgttcgttgctctctgtggcagagggctggtatgactatctttaaacgctgaacgaggagccgcagccgcaggtgcttttcgcgttcgggttagtcacgatgaaacgtgaaccttccaggccttcggtatagtcgacggcgccgccaaccagatactgcaggctcatcgggtcaaccaccaggccgacgccctgtttctcgatggtcatatcgccttcgttgatctgatcgtcaaaggtgaagccatactggaaaccgctgcaaccgccgccggtgatgtacacgcgcagtttcaggttcggattatcttcatccgcaatcagatgttttactttgttcgctgcggcttcggtgaactccagcggcaacgctacgtcatcactcattttttgctcccattgatacttccggccgattaaagaataaccgggccttttgagccattatctaataccctggtaaatcgttcaagtattctcccggggtacctgctgcgctttcgccgcctcttcggccttctgtttcgccagggtacgctgcagaatggtcgaatacaaaggcttacctccgaggaactgcgccaatagtgttgccccaaggcaggtaataatcattggcaaaatgagctgatagttatcggtcatctccagcaccagcacaattccggtgagcggcgcgcgtaccgaagccgccagcaacgcccccatcccggcgatagcgaaggtaccagcatccagatgataggagggaaacagcgggatggcagccatgccgaatgccgttcccagcagcgtccccagcgccagcatcggggcgaaaatcccccccggcgcgccggaagagaagcacagcagcgtggtaatgacgcgagcaataaagatgaacagcagcagcccaaccgagaagttaccggcagcagcgatcgggataaggttaaaaccgccgcctaccgccgttggctgcatcaggcccagcaggccgcaaaggccgccgataagcccgccaatcaacacccattttttgatattgccgccgtggaagcgctggaacatatcctgcgtccgcagcaccagagcattaaacaatggcccgaaacagccaaagatcatgcccagcaccagatacagccacagggtattcaccggcgcattgcttaacttgccgacttcgataatcgccccttcgccgttaaaaatacgaaacacgatgctcgacatgatcacgccggtaaacacggctttaatcgaaatcagattgtagcggaactgcgggcgcatctcttcgatgataaaaaggatgcccgccagcggcgcgttgaaggccgcggagaggcctgatgccgcgccggtggccaacagcgtgtgccgcgcttccgggctgcgcagacgaaacacatccaccaccatgcgcccgatattgccgccaagctgcaccatcggcccttcacgccccagcaccatcccggcgcccagcgtccccataccaccgatgaattttaccggtagcacgcgccaccagcgtaccgggcgcaactcttccagcgcgccttcgatttccgggatcccggaaccgccggcctccggcgcaaagcggcgcaccagaaaatagccaaccatcgccagcagccccgacagaatgaaggccagcggccagacgaggtaccagtggtccgccacctgcaccagggcgccaattcgctggttctgtacccagttcacgctcttttcaaacgccacgcccaccagcccggccagcgtgccgaccaccgccgccatcaacaataccgccagcggcgttttgtcgcgttgaatcaaacggcggaccgcatcgctacggcgcacgcgaacaaactgatgtgcttcaaaagagggagtttctgctttcatgccattatcatttattggtaatacaaatgagaagagaggcattctagccgcctccgcgccgcgcgtcgccaaaaaattgtttcgtccgcttaatgtttcaattgggcaaaactttcataaccttcatggaataacttagaatagcccgataactttattcacgaaccaggatcctggccatgagcaaatctgaaaatctgtataacgccgcccgcgaacttatccccggcggcgtcaactcgccggtccgcgcctttactggcgtcggcggcaccccgctgtttattgaacgtgcggatggcgcctacctgtacgatgtcgatggtaaagcttatatcgattatgtcggttcctggggcccaatggtgctgggtcacaaccatccggccattcgtaacgcggtgattgaagcggcagagcgcgggttaagcttcggcgcgccaaccgaaatggaagtcaaaatggcggaactggttactgaactggtgccgaccatggatatggtgcgcatggtaaactccggcaccgaagccaccatgagcgctattcgcctggcgcgcggcttcaccggccgcgacaaaatcatcaagttcgaaggatgctaccacggccatgccgactgcctgctggtgaaagccggctccggcgcgctgactctcggccagccgaactcgccgggcgtaccggcggatttcgctaagcatactctgacctgtacctataacgatcttgcctcggtacgcgcggcgtttgaacagtatccgcaggatatcgcctgtatcatcgtcgaaccggtggccggcaatatgaactgcattccgccgcagccggagttccttccgggcctgcgcgcgctgtgcgacgagtttggcgcgttgctgataattgacgaagtgatgaccggcttccgcgtcgcgctggcgggcgcccaatcttattacggcgtggagccggatctgacctgtctgggtaaaatcatcggcggcggtatgccggtgggcgctttcggcggtcgccgcgaggtcatggacgcgctggcgccgaccggtccggtataccaggccggtacgctgtcaggcaaccctatcgccatggccgcaggcttcgcctgcttaagcgaagtggcgcagccgggcgtgcatgaaaccctgaccgagctgaccaatcaactggcggatggcctattgaacgcggcgcgcgaaaccgggatcccgctggtggtgaataatgttggcggcatgttcggtatcttctttaccgaagccgaaaccgtcacctgctatcaggatgtggtgaagtgcgatgttgaacgtttcaagcgtttcttccacctgatgctggaagaaggggtttacctcgccccgtcggcgtttgaagccggctttatgtccatcgcccatagcgaagcggatatcaacaacactatcgatgccgcgcgtcgggtgtttgccaaactgtaaggtacttgaatgcctggtggcgcagggattttcccggaggcggcgcattgcgccttatccgggctagcaaatcgagcagcgctgtagccccggtaagcgctagcgctaccggggattttccccggaggcggcgccttgtccgggctactaaatcgcacaacactgtagccccggtaagcgctagcgccaccggggatgttgaggctatcgggatcgttagcggctctgctttctcagcaaatagataaaatacggcgcgccgataaacgtcgacaatagacctgccgggatttggtaggggaacattatcattcgcccgcaccagtcggcgaacatcagcagcatcccgccaatcagcccggaaatgaccatatgcggcatcgtccggcgaaagcccatcatcctcgcaatgtgcggcgccatcaggccaacaaaacttaacggcccaacggttagcgtcgccgttgccgtcaggctcgccgccagcagcagcaacccaatacgcgatggcgtcaatgccatccctaccgctcgcgccgcctcgccgccgagcggcaggatggtcagccagcggcgacagagcggcgccagcgccaatagcgccagcattaccacgccgctacgcagcaccatctcaggcgtcgcgctataggtcgaaccggacatccacgtcaggatctgcgccatgcgcggatcgccgctggcctgtagcatcatcaatagcatggtgaaggcggtacttagcgccatccccgccagcagcatccggtgcggcgagaatccgccgcgcccggcggcgaccaggatgaccagcagcgtcgccgccgcgccaagactgccggctggcagcagccagacaaaagcgttgcccggcacgaagaacagcatcaacaccacgccgaacgccgcgccggagctgatacccagcacttccgggctggccatcgggttaccggtcaggcgttgaataatacaacccgcgacggcaagcatcaccccggcgaacagcgccgagaacacccgcggccagcgccagggcatcaattgttccagcagatcgccgctggcccattgccacccctgcgcatcgcggccaaaggtcagcgcggcggttaccgccaacaacatcagcgccagtccgcccagcgcgaaccactgcacgttgcggcgctcaatcagcgctttatcgccgccattcatcaccggcgcgctgatgctacgcagccgcggcagcagccacagtaataaaggcgcgccaatcagcgcggtgactgacccggtagacacttctcgccatatccggctgagccagagaataatttggtcggaaagccacaggatcagcgcgccaagcagcgccgccagcaccagccgcgatagcaggcggcgggcgccgagcattttcgccagtagcggcgcgaacagaccgataaagccgataataccgaccgcgttgaccagcagcgcgcttattactatcgccagggtcaagacgccaaggcgcgccagagagagcgccagcccgagattccgcgccacgccatcatccagccccatcaacgttaacgggcgtaacaacagcagcgtcaacatcgcgccgccaagcagctgcggccacaggcgctgcgccacgctccagtcggtctgcgtcagcgtaccggtactccacaggaacatgctttgcagctggtcgtgatggaaaatcaccatcagttgattgaccgcgccgcaatagagactcaccaccagaccggccagaatcagcgtcaccggcgatagacgtttgccccacgagacgccgaacaccagcgcgccgaccaggcaagcgccagccagcgcggcaaactgcgacgccagcacaccggggatcgcccatagcgtcgtcaccgtcattccgagctgcgcgccggtggcgacgccgagcgtggtcggctccgccagcgggttacgcagtacctgctggaacagtacgccaacgagccccagtccggcgccgaccagcagcgatacagccagcctcggcagcaggctgtaatggaacagcatctgggcgatattatcgctatccggctgccacagcgcctgacgccactgcgcgtaaggtaaagccacctgaaggttaacgatgctcagcgcgaaagcggcaaccagcagtacggccagcaggatcatggctaacggcgagaaacgcgcgttcatactgccctcccctgcgcatcggccagtacgcgggcgaaatgcatcgccgacagcgtcgcgccatagaaccacaccgccggaagacgctggaaacgcccggcgcgcacgaaaggcatcgcctgccacagcggggtcgccatcagttgggccatctcccgatcgttgccatgatcgaaacagataacatcggcttctttaaattccgccagccgatcgatgcctacggtgatactgccccagaatgccgcttcgccgtgccaggcgtttttgatgccaaagcgatcgagcacttcctggaacaggcagttctcgccgaataccagtacatggcgagcatcaagtagcgaaatcatcagcagcggacgatcgtcacggtcgacaaatcgtggacgcaggctttccatcaacgcgtcgaactccgccagatggcgcttcgcctgctgttgcttacccagcaggtcggccatttcctgcagcgaacgctgggccatcgccagcggccgtttgccgtcgctgaaggtgaaaccgcgaccgggcgcgatacgcgccagcttttccggcgacgggccatagcctgctgaccagacgataaacgacggtttcatctgcgtcagtaattcaagattgggttcagtgcgcaggccgacatcaatcaccgagtcgggtaacgccggttcattcacccacaggttatagttgggaatgtcggccacgccgtagggcgtaacgccgagcgccagcagcagttcggccggcagccactccagcgcgacgacgcgctgcggatcaacgttcgccgcctgcgcgccgcgcatctgccacagcagcggcgacagcgccattgccgtcaacaggcgtcggcgtgagaagaagttcgaattttccatcaatagacaaaacttaccggcgctgcgcccgccgggtgcggcaggatccccatcgggatgccgtagatttgttccagcgtttcgctgcgcatcagttccgccggcgtcccctgggcgatcatttcgccgccgcgcagcgccaccagataatcgcaatagcgggcggccatattaatatcgtgcaggaccgcgatcaccgtcaggccacgctgctggctgagacgatgcaccagcgccagcacatcgacctgatgggcgatatccagcgccgacgtcggttcatcgagcagcaaacagcggctatcctgcgccaccagcatggcgatccacgcgcgctggcgttcgccgccggaaagactgtccaccagccgatgcgccagcggtttcagccccaccagcgcaatggcctcttctactttttcgcgatccgccgcgccgaagcgccccagcgcgccgtgccacggatagcgaccaatcgccaccagttcgcgcaccgtcatcccttccgccgccggcagttgctgcggcagataggccactttgcgggcaaacgccttgctgctccagctgtccagcggctggccgtcaagcagcacatcgccctcggaaggcggctgatggcggccaagcattttcagtaacgtggatttgccggaaccgttatggcctatcaggccagtgacttttcctgccgggaaggtcaacgaaaggggatgaagcagcgtgcggccaggcacgcgaaaggtcacgcgatttaacgcaaacgtcgtttcagagtacggagtctgttcctgcatagcaacaacctgatattgggcgcggcgaaccgcgcccgtaagtagttagaagcggaaggttgcggtagcaacaacctgacgttctgcgccccagaaacaaccatatgtttcaaagcagctggcaacatattcacgatcgagcaaattattaacgttcaccgcgatatttgaaccagccataccaaagcgcgccagatcatatttgacaacagcatccatcaccgcagcacttcctaccttaaaggtatttgctggatctccataactggagccgataaaacgaccaccagtaccaagggttaagccagacaagggcccatcgtagaaggtgtaatccccccacaacgaagccatgtgtttaggtacttgaacaaccgtatttcctttcagattagtatctttggtatagatagcatccgtgtaggtatatgaagcggtcatattgatattggcattcaaagccgctttcgcctctagctcaacaccccgagaacgaatttcacctgccggaacctgattaagtgcattgttaggatccgccatcaatgtatctgacttagttagctggtaaacggcaccagtaacaacaacgggcatatctttcggcacatatttcacccccgcttcgtactgctcacctttagaaggctcataggcaacacgtggagtactatacaagctaaaagcattcggttcgaaggactggctgtaactaacgtacggcgatattccgttatcaaacagatagttgattcccccacgccaggtaaattggtggtcattacgctcaatataaccattgtcactacgtacggtggtcgcttgtttagaccaatcgtagcgcccgcccaacgtcaaaacccatttattccactcggcttggtcctgaagataaatccctgtctgcttactttcattcatttgataaggaacagcatcaccaaaatcaacgctgctcatagacggtaaattattaagatcaagtgacggtgcattaccaaacagggcactaatatcgttacgcatacgcatatagtcgacaccagtcagcaaaatatgatcgacgttccctgttgaaaaattgctttgcagctgggtatcaacactaaaattctgtaaacgctcgttatcaacgactgtacctcgtcctaaataatgagcctgctgctctggagtcagtgattggcaataggagttgaaggcattcatactgttgttgcacagcccggtaccataggcgcttttctgcgcaaccttcatttcagagaaacgtaaattctggcgtactgtgaaggtatcgttaaaaccatgctcgaaactataacccaccatcttttgattacgtgaataggtattattagtcgcgccttcgttaaagctggttggtagatggccgccattagggagtggctgaacagtaccttctttcggcaaccaaccgtaataacccgtttccggctcattttggaaataggataagaaagtaaagttcgtcttatcgtcaggacgccatgaaaaagaaggcgctatcgcatagcgctgctgctccgcattctgttgctgttcattattagagcgagcaacccccgtcaaacggtacgaaaacacaccatcctcatccagtgcgtcactaaaatcaaaacctgtctggaacaggttatctgttcccatcttaaactgaacttcttttagtggctcagtcgtaggccgtttactaaccatactgacaatgccaccgggattacttttcccataaagtaccgatgttggcccgcgcattacctcaacgcgctccagcatgtacggatcaacgacagcatcgttgtaaaaatcgccttgtaacttcaacccgtctagatagttattctggttcaagcctactgacgagaacccccggatgataacaaaatcataagtgttcgatgcaccccggctgctaaccgtcaccccaggcgtatatccaagtgcttccttaacggattggaattgatgcatttgcatctcttcatttgtcaccacggagatagattgcggcgttttttcaatgggagtatcggttttggtcgccgtggcggaacgcttcgccgcgatagtcggggccggcccccaggcgctttcctggctggcgggcgccgcggtaacgacgagggtttcttctttcggttgttccgcagcctgtgcataaacagacatgccgctaaccgccgtggctactacgactgcgattttacgcagcgagtgatttggctgagcagttttaagacgcgccattggtatatctctgatgaaagtgaatgataacgtaaacgagaattattattatgacgggtgacataataggcgaaacgcggaatctaaggcaagcgctatgccgggcaggaagcgccaagggattaataaataaccagacggttattaaggagttatcacggtgttacgcagatgcctgcaataaaaaagccccctaataccttcgtattaaggggctgttcagacgttcggcttaaacggttttagttgccgccaaacatatctttaatccaaccggcaacgccatcgctcttctcctgcttcgcaggttgctgctgttgctgctgcggttggttagcaggctgctgctgcccggactggttgaacgggttattggcttcctgttgttgctgctgctgttgctgcagggcttcgccctgacggcacagcgcatccggcgaggtggtccacaccggcagcgtacgcataccgccgctgcactggaagtaaccattgctgtccacgcccatatccaccacgtcttccggcggcgtcagcgccagcggcgtcggggtctggttagccaggtagcgctgataaatcgacatcgcgccgctggccccgtacagcttggtcggctggttgttatcgcggccaacccaggtaatcgtcacctggctgccatcgataccggcaaaccaggtatccacgttgttgttggtggtcccggttttacccgccagatgcaggccaggatatttggcaccaagctgacggccggtaccgcgctgcaccacctgctgcatggtccacagggtcatataggccgcctgcgccggaacggcgcgttccgcctgcgggtagctctggtacagcaccgtaccatcttcagcaatcacggaacgcagcgccgacagcgtcgcgcggttaccgccgctggcgatggtctggaatgcctgcgccacttcgattggcgtcaggttaagggcgccgaggatcatcgccggtaccgcattcaactggtctttcggcacgcccagcttctgccaggtatcggtgatcgccggcagccccagcgacatcccgaggttaaccgtcggcacgttcatcgaacgggtcagggcatccaccagcatcacctgaccgctaaagcggcgatcgtcgttctgcggcgaccaggtctggccgttcgacaagcgaatcgtcaccggcgcatcggcaatccacgtattcaggcgatactggttcggctggctcagcgcggtcagataagtggccggttttgccaacgaaccaatcgaacgacgcgcctgcatcgcgcggttgtagccggcaaattgcggctccgcgccgccgaccatcgcccggacttcaccggtaaagcgatcgaccaccaccatggcggtttccagatccggcagcttacgctgtttcttcagcaccgggatcccttcaatggccgctttttccgccgcatcctgagccaccgggtcaaaggtggtaaagatcttcacgccggagagatctttcactttatcgcccagtttcgcctgcagctcctggcgcaccatctgcatgaacgccggctgcggtgaaatcactccgccgcgcggctgcacgcccagcggacgcgcgctcagcatatcgtacagctcctggtcgataatattctgctgctgcagcagacgcagcaccaggttacgccgctccagcgccagtttcgggttacgccacgggttatagattgacgcccctttgaccatcccgaccagcagcgcctgctgatcgaggctcagctcttctaccggacggccaaagtagtacaggctcgccagcgggaagccgcggatttcattatcgccgctctgaccgaggtacacctcgttcatatacagctcaaggatacgatccttgctgtaacgggcgtcaacaatgagcgccatataggcttcgttggccttacgccagtaggagcgctcgctggacaggaacaggttcttcaccagctgctgggtcagggtactcgccccctgcaccgtacgccccgccgtcaggttcgccagcaccgcgcggcccattgagtacaggctgatgccgtcatgctcatagaagtggcggtcttcggtcgccagcagcgtatccaccagcagatccgggaaaccgctgcgcttcacgaacaggcgctgctcgccgttcgccgactgcagcatggtgatcaggcgcgggtcgagacggaagaaaccgaactgacggttgttatccatattctcgatggtatccagatgatcgccatcgaaggtcagacgcgcgcgcacctgcccctctttgctatccgggaaatcgaacggacggcggatcatctcgatactgttagcctgtacggtgtattcgccaggacgcgtcattgcgctgacctgacggtactgggtcgcattaagcaggcgcaccatctcgtttttgctgatctgcatatccggctcaaggttgaccatccggccatacactgccgccggcagttcccagactttaccgtcaatacggctgcgaattttctggtcgaggtagacgccataggcggcaataattaccgcaaagacaatccccagcttaaccagcagccacagccagctgcgcttacgacgaggcttgttgcctttgccctttcctttcttcggcattggtcgttcatcctcataatcgtcatcgtaatcatcgtcgtagtcctcttcccggacccggcgacgggtgactttttgttttgccgggcgtgaaggtctccctttacgtccgataggctcgcggtcatctcccgccatgctttttctccgcaactttcaggcgtaaaggcctgattctcaatacttccccctgcaggaggaagaagatatctctcaatttcacacccgccgcgctgccgcggccgacgtctttcatatcatcttcgaagaataattcattaaacaaatcatataattatctgtttaagctgaagaatatctccggacatagcacgaattgtccaggccacagagaatagcactaatccgcgacattcttaaccagcattttacaaccgtaaaacgcgataaacggtaaaatatgatgttttttaataacataaatgttgcgccgcgtgactgcggccagcgattttcggaaccacgcccacagcaagggcgcggcgcctcaggagtattttttcgtccgccgggtcggcgcggtattcgccgggtcatccggccagacatgtttcggatagcgccctttcatctctttttgcacctcgcggtatgccccctgccagaaggcgcttaaatcccgggtaatttgtaatggtcgctgcgccggcgagagtaactccagcaccaggggaacccgtccttcggcaatgcgcggcgtcgccgcctcgccgaacatctcctgcatccgtaccgccagcgccggcgggttatcttcatgataacgaatagcgatacgggtgccggtcggcaccgtgtaatgggtcggcagctcgctatccagcttctggcgtaacgtccacggcagccagttttgcagcgcctgccgcaggtccaccgccttgagcgcccgaagcgaatgcaccccggtcatctgcggcaacagccacgcctccagcgaagctaacagcgatgcgtcatcaacggcgggccagtccgcttccggcagccactgcgcggcgcagtgcagccgcaggcgcagttgttcagcctccggcgtccagttcaatacctcgagccccttatcgcgaataccgttgagcattgcctgatgcagctccgcttccgacggtttcgccaacggctgagtttttatcaccagctggccaatgcagctacgccgccaggcttttagagtaccctgcgcttcatcccactccacggtatcggagcgttgtatcagctcaggacgctgcgccaccagttggtcaatatccagcggcagcgccagcaaaattcgcgcatcgggcgccgaactgccctgtagtagcagcggcgcaattagccattcgtgacgaccgagcgcgtcatcggcatccagcattgcgcccatgccgttagccaactgatagcgcccttcctggccgcgtcgacgggcaatacggtcagcaaaggctggagccagcaacgccgccatccgcgcagcgtctggctgaccgccgcggctggccagccgcttcaataactgctgtgcccgctgctgccagttgccctgctggcgcgcaaacgcggcgcctaaatcgctgctgccgccgcgcggcggctcctcaagaatagccgccagtttcgccgccgtcgccgcgtcatccgcggaatcggccgccgtcagcatggccgccagacgcgggtcgttacccagcgccgccatttggcgcccgtgagccgaaaggcgttcgccctccagcgccgatagcgccgtcaacagacgccgcgccgccgccagattgatcgccggcggtaggtccagccagcgaagctcggccggatcgcggcagccccactgcagcaactccagcagcagccccgacagatcgctttgcagaatttccggatcgctctgcgccgccgcgcgctccgcctgctctttcgccagcagatgcaggcagatccccggctccagacgcccggcacgaccagcgcgctgggtcattgacgcctggcttatccgctgggtgattagccgggtcaggccggtgcgcggatcgaaacgcgcgacccgttcctgagcgctgtcgaccaccaggcgaatgccttcgatcgtcaaactggtttcagcgatattagtcgccagcaccactttgcgcatcccggcaggcgccgggagaatcgctttgcgctgttcgctcagcggcagcgcgccgtataacgggcataacagcacatcgctggctacacgctcgctcaattgttcctgtacgcgctgaatttcgccaacgccgggcaggaataacagcatcgagccctgctcctcacgcagcagatccgcggcggctatcgctaccgcttcggcaaaacgctgatggctcgccagcggcgcaaagcgacgttcaaccgggaacgcgcgcccttcggaaaccaccaccggcgcctccggcaacagacgctgcagacgatcgttatccaacgtcgccgacatgatcagcaacttgagatcgtcacgcagcccctgctggacgtccagcaacaacgccagcgccaaatccgcctgcaggctacgttcatgaaattcatcgaggatcactagccccacgccggaaagttccggatcgtgctgcaaagtacgggttaagatcccttcagtaaccacttccaggcgggtatttggccctacgcagctttcagcgcgcatccggtagcctatcgtttctcccggtttttctcccagtagctccgccagacgctgagcgacgttacgtgccgccagccgccgcggctccagcagtataatccggccatcaatgttgccgtcggcgaggatctgtaacggcagccaggttgatttacccgcgccggtaggcgcattaagcaacacctgcggcgcctgctgcagggcggaaagaagttcgggaagaattgcggcaaccggcaatgaggacacgaagggctccggaggttaacattcgagggcaagcattgtagcatccccgtaattcattaccgagtctctatcatgtccgagccgaaacggctgtttttcgctcttgaactgccgaaagcgatacagaaacagattattcactggcgcgccgcccattttgccgacgatgccggaaggccggtcgccgccgataacctgcatctgacgctggcgtttctcggcgacgtcagcgctgaaaaacagcgcgcgctgtcggcgatggccggacgcattcagcaaccgccctttaccctgacgctcgacgacgccggccagtggctgcgttcgcgcgtagtctggctcggtacccgccagccgccgcgcggcatgctgcaactggcaaatatgctgcgtgcccaggcggcgcggagcggctgctatcaaagcccgcagccgtttcatccgcatatcaccctcctgcgcgacgcccgccacgcggtgccgatcccgccgccgggtttttgctggcaggtgccggtcaacgaattcgtgctttatgagtccagctttatccgcgggcgcacccgctacaacgcgctggaacgttatccatttaccagggaactctgatgctgttcactccgcctttgcagtccgccactttaattaaacgttacaaacggtttctggccgatgtcatcacgccggagggccaggcgctgacgctgcactgcccgaataccggcgccatgaccggctgcgccgcgccgggagataccgtctggtattccacttccgataatcctaaacgtaaatatgcgcatacctgggaattaactgaaacccggcagggggccgtcatatgcgttaacaccttgcgggcaaataccctggcgaaggaagcggtactcgccggaaatatccctgagcttgccgggtataacattctgaaaagcgaagtaaaatatggtgaagaaaatagccgaatcgaccttatgttacaggcagaagaccgccgtaactgctatattgaagtgaaatcggttacgttggcggaaaaagagtacggttattttcccgatgccgttaccgcacgcggtcagaagcacctgcgggaactcatgagcgtcgctgccgcgggccatcgggccgtgattttattcgccgtgctgcattcggcgatagaccgtttctcacccgcgcatcatattgatgccaaatacgcacagctgttgatagaggcgcaggaaaagggggtagaaattctcgcctggaaagcggaactttctaccaaaatgatgactctgaataagccgatcgccgtggcgttaacccccggtaattaaaaggctaaattgtgtccggttcgcgagcgcaaatacgcttttcttcacagcgttgtcaagtgtaacgtttagataattgctatccggaaaagcatctgctatttatagcggcctgatttttcccccacatggggatcgatagtgcgtgttaaggagaagcaacatgcaagaagggcaaaaccgtaaaacatcgtccctgagtattctcgccatcgctggggtggagccgtaccaagagaagccgggcgaagagtatatgaacgaagcccagctggcgcacttcaagcgcattcttgaagcatggcgtaatcaactcagggatgaagtggatcgcaccgtaacgcatatgcaggatgaagctgctaacttccctgacccggtcgaccgtgccgcgcaggaagaagagttcagcctggagctgcgtaaccgcgaccgcgaacgtaaactcatcaagaagattgagaaaacactgaaaaaagtcgaagacgaagacttcggcttctgcgaatcctgtggcgtggagattggcattcgccgtctggaagcgcgtccaacagctgacctgtgcatcgactgcaagacgctggcggaaattcgcgaaaaacagatggcgggttaattcccagctacctcactctctggcgggagtttctcccgcctgattccccttgtgtttaacatgaccgattcagactatatagggcgctttgctccctcaccttccggcgaactccacttcggctcattaatcgccgcccttggcagctatctacaggcgcgggcgaaaggcggtatctggcgcgtacgcattgaagatatcgacccgccgcgggaagttcccggcgccgccgacaccattttgcgacagctcgatcgctacggtctgcactgggacggcgaggtactgtggcaatcccagcggcacgatgcctatcgcgagcgcctcgcctggctgcgcgatcgggatctctgctactactgcacctgcacccgcgcgcgcattcacagcgtcggcgggatctacgacggtcactgtcgcgatttgcgccttggcgccgaaaacgccgcgttgcgcctgcgccagacccgtccggtactggaattttatgaccagttgcgcgggaccctcgtcgccgacgaaccgctggcgcgggaagatttcatcatccatcgtcgcgatgggctgttcgcctataacctggcggtagtggttgacgaccattttcagggggtcagcgaaatcgtccgcggtgccgatctcatcgagccaacggtacgacaaatttcgctgtatcaacactttggctggcctgtaccagattacgtacacctgccgctggcgctgaatgccgaaggtaataagctctcaaaacagaaccacgccccggccctgccggagggcgatccgcgcccggaaattgtgcgggcattaacatttttgaatcaggatgtcgttgaggattggcaagccctgagtattgacgatttactcaaacaagcgatagccaactggcagccagcaaaaatccagcattctcaaatggctcccgctgagctatgattagccgctatttttgctcgtcgcccttcaggttgcccctgaatttgccgtttaaatgcaacctgaagcccatagagtaatgttttatccgaagttcgtctgacactacgaggtgcaccatttttacccgagtcgctaatttttgccgcaaggtgctaagccgtgaagagcgcgaggcagaggctgccgccgtcgaacaaacgcatatgacggtgatcccgcgtgaacagcatgcaatttcccgcaaagatatcagtgaaaacgcgctcaaggtgctctatcgactgaacaaggcgggctacgaagcttacctggtcggcggcggcgttcgcgacctgctgctgggcaagaaaccaaaagattttgacgtcaccaccagcgcgaccccggaccaggtacgtaaactgttccgcaactgccgcctggttggccgtcgcttccgcctggcgcacgtgatgttcgggccggaaatcattgaggtcgccaccttccgcggccatcacgaaggccacaccaacgaccgcgtcacctcccagcgcggccagaacggcatgctgctgcgcgataacatcttcggctctatcgaagaggatgcccagcgccgcgacttcaccatcaatagcctttattacagcgtggcggacttcaccgtacgcgactacgttggtggaatgcgcgatctgcaggaaggggtgatacgcctgattggcgacccggaaacccgttaccgtgaggatccggtgcgcatgctgcgcgcggttcgtttcgccgccaaactgcatatgcgcatcagcgccgaaagcgccgagccaatcccacgtctggctaccctgctgcacgacgtaccgccggcgcgtctgtttgaagaagtgctgaaactgctgcaggcgggttatggttatgaaacctaccagctgctgcgcgaatacagcctgttccagccgctgttcccgacgatcacccgctacttcactgagcgcggcgatagtccgatggaacgcatcatcattcaggtgctgaagaacaccgataaccgcctgcataacgatatgcgcgttaacccggcattcctgttcgcggtcatgttctggtatccgctgctggaaatggcgcagaaaatcgcgcaggagagcgggctggcctattacgacgccttcgcgctggcaatgaatgacgtgctggatgaagcctgccggacgctggcgatccctaaacgcatcaccaccctggtgcgcgacatctggcagttgcagcttcgtatgtcccgccgtcagggcaaacgcgcgtggaaactcatggagcatccgaagttccgcgccgcctatgacctgcttgaactgcgcgcaggcgccgagaacaaccacgaactgcagcgcctggccaaatggtggggcgagttccaggtggccgcgccgccggaacagaaagatatgctcaacgacctcggcgacgatccggcgccacgccgccgccatcgccgcccgcgtaaacgcgcgccgcgtcagggtaacgcatgaccctggtctatatcgccattggcagtaatctcgcctcgccgctcgaacaagtgaatgcggctatccgcgcgctggccgacattccggacagccgcgtggtgagcgtatcttcactgtaccgtacaccaccgctggggccacaggatcagcctgactatctcaatgccgccgtcgcgcttgaaacctcgctcgcgccagaagcgctgctcgatcacactcagcgcatcgaactgcagcaggggcgggtgcgcaaagccgaacgctgggggccgcgtacgctggacctcgacatcatgctgtttggcgacgcaatcattaacagcgagcgtctgacggtgccgcactacgatatgaaaaatcgcggttttatgctctggccactgtttgaaatcgccccgcagctccacttccccgatggcctcgcccttcgcgccgcgctggaaaatctgggcgccgaaaagcctgccatctggtaacccctactcccttttttagcatttacggcgatagtggtaatcggttgcccaaaatcattgcccccctgaatgctgctgttagaatgccggttaatatgactttcatcatcaggaaacgttatgaaaccgaccaccattgccctgctgcagaaatgcaaacaggagaaaaagcgcttcgccactatcaccgcctacgactacagtttcgctaagctttttgccgacgaaggcattaacgtcctgctggtgggcgattcgctggggatgacggtacagggacacgattccacgctgccggtgaccgttgacgatatcgcttaccatacccgtgctgtgcgccgcggcgcgccgaacagcctgctgctcgccgacctgccgttcatggcctacgccacgccggagcaaaccttcgaaaatgccgctgtagtgatgcgcgccggcgccaatatggtcaaacttgaaggcggcgcctggctggctgataccgtcaggatgctggcggaacgcgcggtaccggtttgcggtcacctcggcctgacgccgcagtcggtgaacgtgttcggcggctataaagttcagggccgcggcgatgcggcgcaggcgctgtttgatgacgcgttagccctggaagcggccggcgcccagctgctggtgctggagtgcgtaccagtagagctggcaaaacgcatcaccgaagcgctgacgatcccggttatcggcatcggcgcaggcaacgtgaccgacgggcaaattctggtgatgcatgacgctttcgggatcaccggcggtcacattcctaaattcgcgaagaatttcctcgcagaagcgggcgacatccgcgccgcggtacggcagtatattgccgaagtcgaatccggggcctatccgggcgaagaacatagtttccattaaggagtcttgttgtgctgataattgaaaccctgccgctgctgcgccagcatatccgtcgtttacgccaggaaggcaagcgcattgcgctggttcccaccatgggcaacctgcacgatggccatatgaagctggtcgatgaagccaaagcctgcgcggatgtcgtggtggtcagtatcttcgtgaatccgatgcaatttgaccgcccggacgatctggcgcgctatccgcgcaccctgcaggaggattgcgaaaagctgaacaagcgcaaggtcgactttgtctttgctccggcgccggcggaaatttatccgcagggtactgaaggacagactttcgttgacgttcctggcctgtcgaccatgctggaaggcgccagccgccctggccacttccgcggcgtctcgaccattgtcagcaaactgttcaacctggtgcagccggatgtcgcctgcttcggcgagaaagatttccagcagctggcgctgatccgcaaaatggtcgccgatatgggctacgacattgagatcgtcggcgtgccgatcatccgcgctaaagacggcctggcgctgagctcgcgtaacggttatctgaccgccgagcagcgtaaaatcgcccccggtctgtacaaagtgctgagtacggtagcgggcaaacttgccgcaggcgagcgtaaccttgaggaaatcattgccatcgccgagcaggagctcaatgaatcaggttttcgtgccgacgatatccagatccgcgatgccgacactctgctggagctgacggaagccagcaaacgcgcggtgatcctgatggcagcatggctgggccaggcgcgcctgattgataacaaaatcgtcgagctgggccagtagcctggaacgaaaaatcgggttattttctcatagcggatgccgtgtccgctttgctacataaaggttggaaggtagaagttatgatgcgtaatatgctgcagggtaagctccatcgcgttaaagtcacgcaggctgacctgcattacgaaggttcctgcgccattgaccaggatttcctcgaagcggccggtattctggaaaatgaagccattcatctgtggaacgtgaccaacggtaaccgtttctcaacttatgcgatcgccgccgagcgtggttcgaagattatctccgtcaacggcgctgcggcgcactgcgcaagcgtcggcgatatcctcattatcgccagcttcgtgaccatgtctgacgaagaagcccgcacctggcagccgaaagtcgcctatttcgaaggcgataacgaaatgaagcgccaggcgaaagccattccggtgcaggttgcctgattcttacggcgctgcgctcagccgcagcgccggtttatccttgcggctgattactgataagccgcgacatcgtctccagcgaatcggtacgtaagatatacaaccgcttcagcaggaacggattatcccccggtttcaccttccctctcaccgtcgttaccgccagatgaaaaccggcatcgttcgccgccttgaccgccgtggcgttatagccgccgaacggatacgaaagatacagcacgtgcggattaaactgactcagcgcccgccgggaacgctcgaaatcaaagagaatgttgtgataattccggctgagcaatatcgggtgacgggcggcatcgacccggtgcagaaaatgggtatgcgactgcacatcaaacacgtcctgaatctgcctgagctcagagatactcataaactgcagcgatttcggatcccacttttgcggatgacgtttgatccgcgacgagataataaacgccgtcgcgtggaagccgtactgcttgaggatcggataagcgtagcgattcaccgacttgaggccatcatcaaaggtaatcaccaccgagcgtgcaggcagattcaccttgttacgcagatacccttccagttgatacatcgtcagggtggtataaccctggtcacgcaaccaggtcatctggttactgaaagcgcgcaccgaagtggtggtggaggtatggcgaaaacggctattttcttcatcacgcagaatatggtgataagtcagtagcggaatgccgttatcctcctgcgcatccagactactcacccacgccagccggttgccgatacgaatctgataccaggtctgattaaggcgatctttcagcttgctgataatgggatagcgcaggttattcgctaatgtaccaaacggcgggctgcccactgatggcgcatcgtataccggcgtatctttccaggtcagcaggttctggttgctcaatggctggcgtaaatcgcccaggctatcctcaacccgttttgcgccctgcaccgcccccagatgtcctttatcaataaaaccggtaccgaagccgaaattgaattcataatagtctgccgtggtcggcaccacggcaaggatctgcccggcgcgaacgttgccgacgctcaccacatggttgccgacctgcgcccagatatcggcatcttccgtgacttgcatatagcgtgcgggaacgccctgctggctgagcagactggcggaaacgctggcagatgccagaaaaaggaacaatgtaatgactcgggcaaacatgcgcatcgaaccggtaaacctgaatgccgccattgtaacaaaagcggcatcaatgctaatgcctaatttccgaacgtatcatgcaggagacgaaaaggcgggttcttttgctgctgatgccacaggctgctcaccgtggggcctccggcgctaacgatagcattacggaaggcgtcactgctgagggtatagcgctgtaaatacatttcctccagcaatggatagcgaatgccggaaatgacttcacagtgggtatgtttgtgactcatcagcgcagcggcgcgatacggcgcggcgccggttttatcggtgagaaaaatcaccccatcgccgcagtcggtggcatgcagcgcgtcgcacatcatgcggctcagcatattgacgctcagattacgccagtaattcaccgcccggcattgcgccagcgggccaaactttttctccagacgatccagcatctcctgcgccagctcatcatgacaggtaattacccaacctaacatcgcctacctccttagcaggcaaacaatttagcagggcaagcgttgagatggggtgatgggtatcaaaaattaccgcttagcgccccgccacagtgaaattagcgggggcgctaacagagaggattagctacgcaggccgcgcccgcgctggatcagataccagcacagaatatagaaggccacgataaacaccaccagtacgccaaaggtggtcgccagcgggacgtcatgaatgccgaggaagccaaaacggaagccgctaatcatgtagacgatcgggttgagatgcgacagcgcctgccagaacggcggcaacagcgtcagcgaatagaacaccccgccaagataggtcagcggcgtcagcacgaaagtcgggatcaggctgatgtcgtcgaaggttttcgcaaataccgcattgagcaggcccgccagcgagaacaggattgccgtcaaaatcagcgtcagggcgacgaacagccaggaatgaacctggaacgggacgaagaacagcgagatagccgtaaccagaatcccgacgcacagcccgcgcgccaccccgccgccgacgtaaccggcgatcaccacgtgggttggcaccggcgccaccagcagttcctcaatgttgcgctgaaacttggcgctgaagaacgacgaggcgacgttggcgtaggcgttggtgatcaccgccatcataatcagccccggcacgataaactgcatgtaggtaaaaccgtgcatctcgccgatccgtgagccgatcaaattgccaaagatgacgaaatagagggtcatggtgatcaccggcggcaccagcgtctgaacccagatacgcataaaccggtggatctctttggtccagatgcttttcagcgcgacccagtaaagctgcatcatgctgattctccttttttgtcgtgcaccagcgtgacaaacagctcttccagacggttggccttgttacgcatacttaatacctgcacgccctgggcgcttagctgggcgaaaacgctgttaatcccctgctcgcgcaggacttcaacttccagcgtcgaggtatcaaccagccggtattgatatccatcgagggtcggcagcgggcttttcggcgccagatcgaggataaaggtttccgatttcagctttgccagcagcgccttcattgaggtgttttccaccaactcgccgctctggataatgccgatattgcggcacaacatttccgcttcttccagatagtgggtcgtgaggataatggtggtgcctttatcgttgagatctttgaggaacccccacatcgagcgacgtagttcgatatcaacgccagcggtgggttcatcaagaatgagcagcttcggctcatgcatcagcgcgcgggcaatcatcaggcggcgcttcatcccaccagagagcatacgcgcgcgttcattgcgcttttcccacagatcgagctgtttcagatacttttcgctacgcaagatagcttctttacgctcaacgccatagtaacccgcctggttaaccacgatctgctgtacggtttcgaacgggttgaagttgaactcctgcggcaccagcccgagctggcgtttggcgttcaccacatctttttccaggtcgtaaccaaatacgttaacctgaccggaggttttattgaccagcgaactaatgatgccgatagtcgtggatttccccgcgccgttcgggcccagcagcgcataaaagtcgccggcttcaacctgcaggtcaatgcctttcagcgcctgaaccccgccgggataggttttcttgagctgttttaattccagagcaatggtcattaaatatctcttctcgtgtcttcacatctaatttacccaaataattcatgttgcaggaaggcggcaaatgagcgaatccccaggagcttacataagtaagtgactggggtgaacgagtgcagccaacgcacctgcagcatgaagtatgacgggtaaagattgttttcaaaaaggtgagcttaccctatattagcgcaacgcacttacttggttacaggccgtaaacgtccatgaatgatatagatacactcatcagcaataatgcactatggtcaaaaatgctggtggaagaggaccccggcttctttgcgaaattgtcgcaggcgcagaaaccgcgctttctgtggattggctgttccgatagccgcgtccccgcagagcgcttaaccggcctggaacccggtgagttgttcgtgcaccgtaacgttgccaatctggtgatccacaccgacctgaactgtctgtcggtggtgcaatacgccgttgacgtgctggaagtcgaacacattattatctgcggccactacggctgcggcggtgtacaggcggcggtcgaaaacccggaattggggcttattgataactggctgctacacattcgcgatatctggtttaaacacagttcgctgctcggtgaaatgccggaagagcggcgtctggatacactttgcgaactgaacgtgatggagcaggtatacaacctgggacactcgacgatcatgcagtcggcgtggaaacgtggacaaaaagtgacgatccacggttgggcttatggtattcacgacggactactgcgcgatcttgatgtcaccgccgtcagccgggaaaccctcgagcagcgctatcgccacgggatttccaatctcaagagcaagcacgccaaccataaatagccgccgccctcaccgccccggataaggcgctcgccctatccgggaccgcaacaataattactcgtccagcaggatcactttgccgacatacggcagatgacgatagcgctgagcgtagtcgataccgtagcccaccacgaactcatccggaatcgcaaaaccgacaaactccaccgggacgttcacttcacgacggcttggtttatccagcagcgtacagatagccagtgatttcggctcgcgcaggctgaggatttcgcgcactttagacagggtgttgccggaatcgatgatgtcttcgacgatcaatacgtctttaccgcgaatatcttcatccaggtctttaaggattttgacatcgcgggtggtggacatgccgctgccatagctggaggcggtcataaagtcgacttcatgcggcacctgaacctcacggcacaggtcagccataaacataaatgaaccgcgcagcagacccaccagcaccatttcactgccgctgtctttgtagcgttcattaatttgacgacccagttcggcgatacgcgctttgatctcggcttccgggatcatcacttctacagtatgtttcattaaactaaccatttgattcttaggataaatcttcaaagccgttgctttcacatcgacgttgaccggcaagcgatacagtataccagcaaaacgaaatcttcggtgcagtgaataataaagccatatttgtgattccgatcacagttgttaaatcctataattaattgcagttaaaaaattaacaactgaagagtgtctttctatggcagaaacaaaatctcaacaatcacggttacttgtcacgctgacggcgctgtttgccgccttctgtggcctgtatctgttaatcggtggggtatggctggccgctatcggcggttcctggtactaccctatcgcaggcctggtgatgctggccgtcaccgttatgctgttccgcggcaagcgcgctgcgctgtggctgtacgccgccctgctgctggcaaccatgatttggggggtatgggaagtcggtttcgacttctgggcgctgacgccgcgtagcgacatcctggtcttcttcggcatctggctgattctgccatttgtctggcgtcgtctgccggtcccttccgccggcgccgttggcggtctggttatcgccctgctgattagcggcgggatcctgacctgggccggtttcaacgatccgcaggaagtgaacggtacgctgagtgctgacgcgacgccggccgcgccgatttctaccgtcgccgatagcgactggccggcttatggccgcaaccaggaaggccagcgttattcaccgctgaagcaaattaataccgataacgtgaagaacctgaaggaagcctgggtattccgcaccggcgacctgaagcagccgaacgatccgggtgaaatcactaacgaagtgacgccgattaaagttggcgacatgctgtatctgtgtaccgcgcaccagcgtctgttcgcgcttgacgcggccaccggtaaagagaagtggcattttgacccgcagctgaacgccgatccgtcgttccagcacgtgacctgccgtggcgtttcctatcatgaagccaaagcagataacgcgcctgccgacgtcgtcgccgactgcccgcgccgtattattctgccggtcaacgatggccgtctgttcgcggtgaacgccgacaacggtaagctgtgcgaaacctttgccaacaaaggcattctcaacctgcaaaccaatatgccggtaaccacgccgggtatgtatgaaccgacgtcgccgccgattatcaccgataagactatcgtcattgccggcgcggtaaccgataacttctcaacccgcgagccatcaggcgtaatccgcggctttgatgtgaataccggtaaactgctgtgggccttcgacccgggtgcgaaagaccctaatgcgatcccgagcgatgagcatcacttcacactcaattcacctaactcctgggcgcctgccgcctatgacgcgaagctggatttagtctatctgccgatgggcgttaccacgccggatatctggggcggcaatcgcacgccggaacaggaacgttacgccagctctatcgtagcgctgaacgcaaccaccgggaaactggcatggagctaccaaaccgtacaccacgatctgtgggatatggatatgccgtcgcagccgacgctggccgatattgatgtgaacggtaaaaccgtaccggtgatttacgctccggccaaaaccggcaacatcttcgtgctggatcgccgtaatggcgagcaggtggtcccggcgccggaaaaaccggttccgcaaggtgcggcgaaaggcgattatgttgctaaaacccagccgttctccgagctgagcttccgtccgaagaaagacctgaccggcgcagatatgtggggcgccaccatgtttgaccaactggtgtgccgcgttatcttccatcagatgcgctatgaaggtatcttcactccgccgtctgaacagggcacgctggtcttcccggggaacctggggatgtttgaatggggcggtatctccgtcgatccaaaccgtcaggtggctatcgccaacccgatggcgctgccgttcgtctctaaactgatcccacgcggcccgggcaacccgatggaaccgccaaaagacgcgaaaggctctggtaccgagtccggcgttcagccgcagtatggcgtcccgttcggcgtcacgctgaacccgttcctgtcgccgtttggcctgccgtgtaaacaaccggcatggggttatatctcggcgctggatctgaagaccaacgaagtagtgtggaaaaaacgcatcggtacgccgcaggatagtctgccgttcccgctgcctgtcccgctgccattcaatatgggtatgccgatgctgggcggaccgatctcaaccgccggtaacgtgctgtttatcgccgccaccgccgataactacctgcgcgcttacaacatgagtaatggtgaaaaactgtggcaggcgcgtctgcctgcaggtggccaggcgacgccgatgacctatgaagtgaatggcaagcagtacgttgtcatctctgccggcggtcatggctcgttcggtactaaaatgggcgactacatcgttgcctatgcgttaccggatgacgcgaaataaaacgcaaaacggcaacgaaagttgccgtttttttgtttgccccctcccctatgggagagggcggcaggccgcacactcctaaacggtgaaccccaacatcatcccggtgtcttcatgctccagtagatgacagtgcgccatataagcaaactccctgggcgcctgatgatcgaacttcaccagcacttcactcaccccgccctccactcttaccgtatccttccagccgcgacgatgcgccgctggcgcctggccattttcactcagaatgcggaattgcgtgccatgaatatggaaaggatgcagcatcatgtcgcccttgccggagatcagccagcgctcgtactgccccctggccgcggcgaacatcggcacattcatatcaaaggctttaccgttgatacggttggcgttatggaaatcgaatcccttatcagatgaagcgccatgtcccattccgccaccatggttcatattcttcatctgaccgtgattcatattgcccatgtcgccatgatccatcatcatcccatggctcataccggacatcgcctggtcgccatatttcttcatcagcgcctgcattcccatcatatcgagcatcggatccatcgacagctgtagcgtgcgctgcgtcagcccctccagtgacggcagcgcgggcatcgccgccaaagtatcgggtagcttaccggatgccgggatcaatagcggctgtatacggagcaccggctgcggcttatcaaatggcgcaatcgccatccccatctggctcaccggcagcgtcaggagatcaaatgcctttccgtcgcgggtatcaatcaatacctcaaagcgctcgcccattagtaccggcagttcgctcactttgaccggttccgctaacaggccgccgtcgcttgctactacatacattgggcggcgatcgctggtagcgaaattcagcgagcgggcattacaaccattaagcagacgcaggcgcagccaaccgcgcggcggagcgtgttcgggatacagcgcgccgttagtcaacagggtatcgccaaaccagccaacggcggcgctcatgatatcgagctggtaatctatttctccattggcattgaatcttttgtcctgcacgatcaccggaacatcatcaattccccactgcttcggcagcagtaattgcccgctctcgacatcttcaatcagcaccaaacccgccagccccatcgcgacctgacggccggttttaccatgctgatgaggatggaaccagcaggtcgccgctcgctgcgtcggcgtaaaactcaccgtccttgaggctcctgcggcgatgacgccctgcgggccgccatcgacttcgccaggcacttctagtccgtgccagtggaccgtggtctcctccgccaggcggttatgaatatctaccgtcaccgcttcaccttgcttcagcttcaacgcgggcccaaggaggctgccgttataaccccaggtcgtcgcaagatgcgggccaaactgcgtctttccggcttgaatcgtcagcgtaatgcgattgcgcgcgtcggcggtcaataaatccgggaccggcaaagccggacggccagcagcgaataccgaacggctccagagcggtaaggcgctgaccgcgccaagcgcggcgcttaatttgataaactcacgacgttgcattttcacatccttttattctgctggtgaatatttaagcttaaaccctcccgcaacgggaaggtcaagcagaagcttgtgaataaagctctgcgtggtgtaaagaagtatgctaactttgattgtccgtgtttcaatggtagaaaaaatgaagacgtttttcagaacaatgctgtttggcagcctgctcgccctctccgccaatagctatgcattaagtgaatccgaagcggaagatatggctgatttaacggcggtatttgtattcctgaaaaacgattgcggctatcaaaatttgccaaatacgcaaattcgccgcgcgttggtcttttttgcccagcaaaaccaatgggacctcagcaactacgacagctttaatatgaaagcattaggtgaggacagctatcgcgatctcagcggtatcaaaatcccaacagccaaaaaatgcaaagctctggcccgagactccctcagcctgctggcctatgtgaagtaagcctatctgcagccgcggcgatgcggctgcatctgtgtattcacgcctccccctctccaccaacattgacgaaatatgaattcattaaccggtatttatatttgacgccccctgatactatttacttttattaattaatcgttagcttaatttatcagtaaaaatcacattcaagagcaaacaattcaactcgtcatttattgcaaaggccatcaagcgaattaaaatcgccagtaacctctcttattgcaatggaatgacattttgaatatctcacctttttttcgcttacttccgttcgcgtttatcatgctagctggctgccaggcacatcgtcaggctaacacacccataacgccaccaatcgccatcgccaccgatgcgcaacagaatgaaaagctgcggctggccgctgaacaggagcggcttaatgcctgtcgccaggctttagattcgttaaaagaggttaatccgaaagaagcctcaagactgggtagtgaattcaccgcgctgatcggtgcggcgtcgcaatataattcagtgcgtacgaaagtcgccgatcccacccgtcagggcatcgattccatgtatcaatttaaatccatcaagctttgcgccgatattgaaaagtcgctgatcgatagtctggtcatgcgcggcgataatgcggtgaagtgacaggcgctatgataattcgccttaatataatgacgctggccttccttttgctggcgtccctttttattggtcatgcgcaagcggatgacggcgcgcctgcgtttctcaactatgtccagcagcaggagaaaaaagagaagaaagaaatacctccggcgccggaggccagtaaacccgtcagggcccgcgacaacaacacggcagcgctgcaaaaaaaactggccgcgcaaaaaagtctcattgccgacaaagataagaccatccgccagctgcaggcacagctaaaatcacaatctcccgccgtcacgccagcgccggtagataattcagcgttgaataaaaccatcgcacagcttcagggccggataaccgcgctggacacggaaaacaagcggcttgttcagcaagcccgcaccttccagcaggaaaaagccgacggcgcggataatctcaaacgctctgccgccgctctgcaggcgcaaacggtaaagctcaacgcgctggagacagacaagcaggccctgagcgataagctggctgcggcaatggcggagaagcagaagctgagctccgaactcgccacagtaaaaaccaccaccgcggcaaccaaatcatccgcgctaaacctcagtaatgccccacagcagcaggcatactccgtcggtgtatcaatagggcaagatgcgcttaaaacgctgtccagccaggcagcgaaagggttaaatctgcaacaggagaccgttattaagggcattaacgatgtttttgccggtaagctggcgctggatgaacaagcgcgcaataaggcgcttttcgacgtgtcgcagcggttatacaaaaacattgataaaattgagcagcaaaccctccgcgaaggtaaagagtatcagcagcaatttgccgcgcagaaaggcgttctactcaaaggcgggatctatagccgcattgactaccccggcaaaggtgaaattgatgataacgatatcgtcaccgtcgttatcaaagaaagcttgatcgacggtaccgtgataaacgatatggaagccgaagataaggtctggtcacaggcgctaagtcagtatcccgtgaccttccgtgaaccgcttaaacgcctgaataaccatggtgccatcactatcgtggttccatcggagcgcgcctacggcagcaaagggatccctggaaaaattccgccgggcgcgacgatggtgtataccgtgcgaattgttgacgtcaggcccaacagcgatcaacaacccaaaacacctgcgccgaaaacctcacgctagcgagagttcagccaaacagtagaaggttcactattcgccatatcaatctctatctatagttggctatgatggggtgcccgctttgtgggcaccacagaagttaacaaaggaggagtaagccatggccgagagtaatcagtggcatgagacgctgcacgaccattttggtcaatattttaccgttgataacgtgctgtaccatgagaagaccgatcatcaggatttaatcatcttcgaaaatgcggcatttggccgcgtgatggcgcttgatggcgtggtgcaaaccaccgagcgcgatgagtttatttaccatgaaatgatgacccacgttccgctgctggcccatggtcacgcaaagcacgtgctgatcatcggcggcggcgatggcgcgatgctgcgtgaaggctcccgccaccaacatatcgaaaccattaccatggtggaaatcgacgccggagtggtatcgttctgccgccagtaccttccaaaccataacgccggcgcctatgacgacccgcgctttacgctggtgattgatgacggcgtgaacttcgtcaaccaaacgtcacaaacttttgatgtcattatctccgactgtactgacccgatcggccccggtgagagcctgtttacctcggcgttttatgctggctgtaaacgttgcctgaaccccggcggaattttcgttgcccagaacggcgtaagcttcctgcagcaggatgaagcggtaggcagccatcgcaaactcaaccactatttcaccgatgtcagcttctaccaggcggcgatcccgacctactatggcggtatcatgacctttgcctgggcgaccgataatgaagccctgcgtcatttgtcgacggaaattattcaggcccgcttccatagcgccgggctgcaatgccgttattacaacccggcaattcataccgcggctttcgcgctaccgcaatacctgctggatgcgctgaccgccagctaacctgaaacgaggaggtgaaccaaattgaaaaagcttaagctgcacggcttcaacaacctgactaaaagcctgagtttttgtatttacgatatctgctacgctaaaaccgccgaagagcgcgatggctatatcgcctatatcgatgaactctataatgccaaccgcctgacggaaatcctctccgagacctgttcaatcattggcgccaacatactcaacatcgcacgccaggattatgaaccgcagggggcaagcgtcaccattttggttagcgaagagcctatcgatccgcagcttatcgatcagagcgagcatccgggcccgctgcctgagaccgtggtcgcacatctcgataaaagccacatctgcgtgcatacctatccggaaagccatccggaaggcggtctgtgcaccttccgcgccgatattgaagtctccacctgtggagtgatttcaccgctgaaggcgctgaactacctgattcaccagctggaatccgatatcgtaaccattgattatcgcgtgcgtggtttcacccgtgatatcaacggcatgaagcattttatcgatcatgaaatcaactctattcagaacttcatgtcagaagatatgaagtcgctctatgacatggtggacgtgaacgtctatcaggaaaatatgttccataccaaaatgatgctgaaagagttcgatctgaaacactacatgttccacaccaaaccggaagagttaagcgaacaagagcgcaaggtgattaccgacctgctgtggaaagagatgcgggaaatttattacgcccgcaatatccctgcggtgtaatgactgaaatgcccggcggcgcttttgcttgccgggcctacggggttccgcgccgcccggcaccgaacgaatcattaacgctgctgcataaattcacggtatgcggcaaccacctgcaggaaatcctccacgccgcaaagagagaggctctcttcgtcgtagtaattcatcccctcttccatttcatcgccggaaaattccagttggttggcgcggatcatcacttcttcgccatccagccacaacgtatattcatggccggcccgctgccaggaacgttcactgcctttcacggtgcgcgctgcctgttccacttcatccagaagggccaggttatctttcacctcttcgttgaaccagtgaccaatcgcctcgtggtccatcgacattcgcacctttaccacaccggtaatatcgcgcagaaattcgtaatccataatcttttcctctgcaagggcaatgcgtcaccgctgcactgtacccataacctaattatcgcagcagaaaggaagaaaaaaagcgcaacgggtgggaggtttaaaaataaaaatgcccgctgatgcaatgttcagcgggcattggagagtttgtagccaaacggtcagccgggctgaccgaacggattacacggcggtctggaagatcacgccgtcagctttttcagtgtactgatccagctggttaaagttcaggtagcgataggtatcttccgccgtcttatcaacctgagcgacgaaggtctgatactcttccggcgtcggcagtttgcccagcagagaagcgaccgccgccagttcggcagaggccagatagacgttggcgccggtacctaaacggttcgggaagttacgggtagaggtcgacacgaccgtcgcgccgtcagccacgcgcgcctggttgcccatacacagggaacagccagggatttcgatacgcgcgccgctcttaccaaacacgctgtagtagccttcttcagtcaactgcgcggcatccatacgggttggcggcgccacccacaggcgagtcggcagttggcctttgtggctgtccagcagtttaccggcagcacggaagtggccaatgttggtcatgcaggaaccgataaacacttcgtcgatcttctcgcccttcacatctgacagcagacgcgcatcgtccggatcgttcggtgcgcacaggattggctctttgatatccgccagatcgatgtcgatcactgccgcgtattccgcatcagcgtcggcttccagcagctgcggatccgccagccatttttccatgccctggatacggcgctccagcgtacgacgatcgccgtaaccttccgcgatcatccacttcagcaggacgatgttggagttcagatactcgacgatcggctctttgttcagcttaatggtacaaccagcagcagaacgctcggcagaagcatcggtcagttcaaatgcctgctcgactttcagatccggcagaccttcgatttcaaggatgcggccagagaagatgtttttcttccctttcttctcaacggtcagcaggccctgcttgatagcatacagcgggatggcgtgaaccaggtcgcgcagggtaatgcccggctgcattttacctttgaagcgcaccagtactgattccggcatatccagcggcatcacgccggtcgcggcggcgaaggccaccagacctgagcccgccgggaaggagataccaatcgggaaacgggtatgggagtcgccgccggtacctacggtatcaggcagcagcatacggttcagccaggagtggataacgccatcgcccggacgcagtgaaacaccgccgcggttcatgatgaagtccggcagagtgtggtgcgtggtgacgtcaaccggcttcggataggctgcagtgtgacagaaggactgcatcaccaggtcagcggagaagcccaggcacgccaggtctttcagctcatcgcgggtcattggaccggtggtgtcctgagaaccgacggaggtcattttcggctcgcaataagcgcccggacggataccggcaacgccgcaggcgcggccaaccattttctgcgccagagagaagccgcggttgctttccgccacatctttcgcatgacggaagacgtcgctatgcggcagacccagcgcttcgcgcgctttggtcgtcaggccgcgaccaatgatcagcggaatacggccaccggcgcgcacttcgtcgatcagtacatcggttttcagttcgaagcttgccaacagctcgttggtttcgtggttacgcacttcgcctttgaacgggtaaacgtcaatgacgtcgcccatgttcaggttgctcacgtccacttcaataggcagcgctcccgcatcttccatggtattgaagaagataggcgcaattttgccgcccaggcacaggccgccgccgcgcttgttcggtacgttcgggatatcgtcgcccatgaaccacagcaccgagttggtggcggatttacgcgaagaaccggtaccgacaacgtcgccaacgtaggccagcgggaagcctttctgctgcagcgcttcaatttgtttaatcggaccgactgcgcccggctgatccggctcaataccttcacgagcgtttttcagcatcgccagagcgtgcagtgggatatccggacgggaccaggcatcaggcgccggagacaagtcatcagtattggtttcgccggtaactttgaagacggtaacggtaattttttccgccagttgcggacggttcaggaaccactcggcgtcagcccaggattgcataacctgtttagcgtattcattacccgctttggctttctcttctacgtcatagaagttatcgaacatcagcagggtatgggacagcgctttcgccgcaatcggcgccagtttggcatcttccagcgcttcaatcaggggatgaatattgtaaccgccctgcatggtgcccagcagttcaacggctttttcaggggtaaccagtggggaggtcgcttcgcctttagcgatagcggcaaggaatccggctttaacataggcggcttcatcgacgcccggcggtacacggttggtaagcagatctaacaggaattcatcttcacccgctggcgggtttttcagcagttctaccagcgcggccatttgggttgcgtctaagggtttggcaacaatccccatggcggcacgctcagctacgtgcttacggtattcttctagcacgacggttctcctcgctctcattgtaaaatgcggtaggcgattttcttcacgctcctgtgagacagcagtttgtagggtaaatgcccgataccgcgagggcagcatagcaggatttttgaagggtgttaatctgtttacaaaaaagcaacattaaaaattagctgaatcgttaagggcaggatattgcaggctttctgttcaaatgctggtagataaatttatttctgtaacagatttaatgtcaggatcccaacaaaaatcaaaaaaaacaatatcgtcttcatatactcccgtaacgtaccgttttcgccgatacttgagcgagatgggtaacatttctgtgtcaggagcttccatgtcactaccgttcaaaccccatattatcgccctgctctgcagcgccggcttactcgcggcggcgggaacgctatatgttaaaagtcgtaccccagagactatcgctgaagcgccggtgacggcgcagcctgtgccaacgtcagcaccagcgactgcgccagcgcaacctgtcgccgccacctatacccaggcgcaaatcgaccaatgggtcgcgccaatcgcgctctacccggacagtttactctcgcaggtactgatggcctccacctatccggacaacgtcatgcaggcggtgcagtggtcgcaggataacccgtcgatgaaaggcgacgcggccgtgcaggccgttgccaaccagccgtgggatccgagcgtcaaatccctcgtcgcttttcccgccctgctggcaatgatgggcgaaaacccgccgtgggtagaaaaccttggcgatgcatttttagcccagccgcacgacgtgatggattccgtacagcgcctgcgcgctattgcccaacaaaccggaacattaaaatccacaccgcaacaaaaggtgaccgtcacggccgccgcgccggcctcttcgaggtcatcgaatagcagcacggtatcaacctcgacaacctcaacgccatcgccagcgccttcgcagatcatcaaaattgaaccgaccaatccgcaggtggtatacgttccaagctataacccttcgaccgtctacggcagttggccgaatagcgcctatcccccggtctatctgccgccacctccaggagagcagttcaccgatagcttcgtcaaaggttttggttacagccttggcgtcgccaccacctgggcgctcttcagcagcatcgactgggatgatgacgatgattaccatcatcatgatgacgattaccatcacggcggttaccagcacaatggcgataacatcaatattaatgtgaataatttcaaccgcattaccgggcagaatctgccgggtaaccatgttaactggcagcacaaccccgcctatcgcggcaacgtgccttatccgaataataatgtcgcccagcgctatcatcagaccaatgtgcccggcggactcagcgcaacccagcatgcgccggtcgatcgcaatgctcaacggcaagcggcgatgacgcagctccagcatcccaacgcccctgccgccagcgcaggcaaactggcggccactagcgcctcgcgcgatgcgcagcgtcaggcagcctctcagcaattgaagcaggccacccagcgcagcagctaccgtggctacgacagcacgccgacgcctgccaaacagcagcgtcgcgaagcggcgaaaacgcagctgcaacacccaacgccacagcagcaacagcatcgcgaggccgtgaagagccacgtgcagaatccaacgcctcagcaacaacagcgccgtcagcagactcactccgcgacgccggcccaacgtcagcaagctgtgagcacggtacgcgccaatgccttaagcggcaacgaaagtcgctccccctcctggcaatcacagcaggcgcgcgggctgcaaagccgtaatatttccggcttgagcagcgaacagcgcggcgccgccagagagcgtctttccgaacatcatgaattgcgtcgtcgctgaggatgagcagatgagaaaaccattacagatcgccctattatcgctaatgctgtcgccgctcgccgccttcgcccagcaaccgttccccacgccggagaaagccgcaagcgcgctggccgatgcgctcaatcatcgtgataaagccgcgctcaataatctgctcggcgataactggcagcagtttttacccaccgatggtattgatcccaatgccgtcgaccgctttcagcgcgactggcaggtgaaacacgtcattgtccagcagggtaatagcgcctggcttgatgtcggtagtgaagcgtggcggttgccgattcccattgtcaaagatgaacagggctggcgttttgatatggcggccggagaagatgaaattctcacacgcgccatcggccgcaatgaactgtcggcaattgccgccatgcacgcctacgttgatgcccagcaggattactatcaaatgaatcatcgctgggcgcaaaaaatcatcagcagcgaaggcaaaaaagatggcctgtactggccaacctcaccgggcgaaacgcccagcccgctggggccggcctttagcccggctgagcccggcgccggttatcatggctaccgcttccgcattatcgccgataacgataaccaaggcgtcgccttactggcctggccggtggaatggggagaaaccggggtgatgagcttcatgatcgatcagaatgatcaagtctggcaggcgaacctgggcgaagagagcgcgacgaaagcgcaggcaattacgcattttgcccccgattcagcagcgggatggcagccgatcaatcaataaaaaaatgcccggttgcgcgatagcaaccgggcactctcttatgtttagccctggtgcggcatcagctccggataaccggcaaaagcaggtttctgactggtcagcgccgcttcatccgagctgatgctcccggaatttgccgcccacaccccttcattcgtcttcgtcaccaactgatgctgcgcattcagatcctggcccatcgccgcaatatgggtactttcggtaccgccgctgttcgccgcccatggaatggttacatcagccgcgcaggccataccggatacgaacatcgtggctaacagtgccgtggtcaataagcgtttcatctcacacctcagatacataattaactacctattagtttactgggtgactattttcaaagtatgtatgaggtgtagcggtttgtgaacagggacatagttctaaacattagcgataaaaaaagcggctcttagagccgcttatgcattttagctgaaagaaaaagttactttttcttcgctttcgcgtttggcaggtcggtaatgctaccttcgaagacttctgccgccaggccaacggactcatgcagagtcgggtgagcgtggatagtcagcgcgatgtcttcagcgtcgcagcccatttcgatagccagaccgatttcacccagcagctcgccgccgttggtgccgacaatcgcgccgccgataacacggtgggtctctttgtcgaagatcagtttggtcataccgtctgcgcagtcggaagcgatagcacggccggaagcagcccacgggaaggtggcagtttcgtagctgatgcctttctctttcgcttctttctcagtcaggccaacccatgccacttctggctcggtgtaggcgatggacgggatcactttcggatcgaagtagtgtttcaggccggagataacttctgcggcaacgtgaccttcgtgtacgcctttgtgcgccagcatcggctgaccgacgatatcgccgatagcaaagatgtgcggcacgttggtgcgcatttgtttgtcaacgcgaatgaagccgcgatcgtcaacttccacgccggctttgcctgcgtcgaggtttttaccgttcggcacgcggccgatagctaccagcaccgcgtcgtaacgctgcgcttccgccggggcttttttgccttccatggaaacgtaaataccgtcttcttttgcttcaacggcagtcactttggtttccagcatcaggttgaatttcttgctgatacgcttggtgaaaactttaaccacgtctttgtcggcagccgggataacctggtcgaacatttcaaccacgtcaatctctgaacccagcgcatggtatacggtacccatttccagaccgatgataccgccgcccataaccagcatgcgtttcggtacagatttcagttccagagcgtcggtggaatcccaaacgcgcggatcttcatgcgggataaacggcagttgaatcggacgggagcccgccgcgatgatcgcgttgtcgaagttaatcacggttttgccgttttcgccttcaacttccagggtgttagcgccggtgaatttacccagaccgttaaccaccttcactttacgacctttggccatgccagccagaccaccggtcagctgagtgataactttttctttccaggtgcggatcttgtcaatgtcggttttcggttcgccgaaaacgatgccgtgttcggccagcgctttcgcttcttcgataactttagcaacgtgaagcagtgctttagaagggatacaacccacgttcaggcaaacaccacccagagagctgtaacgttctacgatgacggtttccagacctaaatcagcgcaacggaaggctgcagagtagcctgcaggacctgccccaagtaccacgacctgagttttgatttcagtactcatcatgacctctgtaatttatatccggcgggtctgacgcttttattattacgcccaagtccaccgggacgttctatccgcgtgtattttacaaaattgttaacaatttttaaacaacaaacggcaaacgattttgtcctttgttgctgataatcctcaacagcctgaggttatcagaaaaaagccggccgtcaggccggctttttcgcttacatcaccaggcggcgaatgtcgctcaaggtgttgttaatgatggtaatgaagcgggcaccatcagcaccgtcgatgacgcggtggtcgaaggacagagagatcggcagcatcagacgcggaacgaactctttaccattccataccggctccatcgcggacttagacacgcccaggatggccacttccggcgcgttaacaatcggcgcgaagtgggtagtacccaggccgccgatgctggagatggtgaagcaaccgccctgcatttcgccagcagtcagcttgccatcgcgcgctttcttcgagatggtggtcagctcgcgagacagctcggtgatgctcttcttgttcacgtctttaaagaccggaaccaccagaccgttcggagtatcaaccgccacaccgatgttgatgtatttcttcagcgtcaggcgctgaccgtcttcggacagcgagctgttgaagcgcggcatctgctcaagcgcagcggcaacggctttcatgatgaagaccactggggtgaatttcacgtccagtttgcgcttctcagcttcggcattctgctgcttacggaacgcttccagatcggtgatatcggttttgtcgaagtgcgtaacgtgcgggatcatcacccagttacggctcaggttcgcaccagagattttctggatacgacccagttccacttcttcgatttcgccaaacttgctgaagtcaactttcggccatggcagcatgcccggcagaccgccgcctgcggcagcagccggtgcggattcagcgcgtttaaccgcttctttcacgtaagcctgaacgtcttcgcgcaggatacgacctttacggccggtccctttcactttcgccaggtttacgccgaactcgcgcgccaggcgacgaatcagcggagtcgcgtgaacgtaagcttcgttttcagcgaattcggttttaccttctgctttcgcagccggcgcggcagctttctgagccggtgcaggtgcagcagccggtgccggtgccgcggcctgagccggagcagcagcaggcgcggcgccttccacttcgaagaccatgatcagagagccggtggatactttgtcgccggtgctgattttgatctctttaacggtacccgcaaacggcgccggaacttccatagaagctttgtcgccttcgacggtgatcagtgactgctcagcagccactttatcgccgacttttaccatcacttcggtaacttcaacttcgtcgccgccgatatccggtacgttaacgtctttcacgccagccggtgccgcggcagccggagcggcagcctgtgccggagcggctgcaggcgcagcgcccgccacttcgaagatcatgatcagggagccggtggacactttgtcgccagtgttgattttgatctctttaacggtacccgcgaacggcgccggaacttccatagaagctttgtcgccttcgacggtgatcagggattgctcagcagcgatggtgtcgcccactttaaccatgatctcggtgacttcaacttcatcgccgccgatatccggtacgtgaacttctttcgctgcgcttgccgccggcgctgctgccggtgccggtgccggagcagccgctttctcttcctgcgcaggtgcagcggctgctgcaccctcggcggaatcgaaaatcatgatcagtttgccagtctcggttttgtcgccgacggagactttaatctctttcacgacgccagcctgcggagacggaacttccatagaggccttgtcgccttctacggtgatcagcgactgttcagcttcaactttgtcgccaactttgaccaggatctcggtgatttcaacttcatcagccccgatgtccggtactttgatttcgatagccattattctcttacctcttacgccagacgcgggttaactttttctgcatcgatgtcgaatttagcaatggcgtcagccacaactttcttatcgatttcaccacgtttagccagttcgcccagcgccgcaacgaccacgtaggaagcatcgacttcgaagtggtgacgcaggttttcacggctgtcggaacgaccgaagccatcggtacccagtacgcggtaatcatcagccggtacgtaagtacgaacctgctcggcgaacagtttcatatagtcagtggatgctacagccggagcgtcgttcatcacctgagcgatgtacggtacgcgcggagtttccagcgggtgcagcatgttccagcgttcgcaatcctggccatcacgcgccagttcggtgaaggaggtgacgctatacacgtcagaacctacgccgtaatctttcgccaggatctgcgctgcttcacgaacgtgacgcaggatagaaccggagcccagcagctgaactttacctttgctaccttcgagggtttcgagtttgtagatacctttacggataccttcctcggcgccttccggcatggccggcatgtggtagttttcgttcagtgtagtgatgtagtagtaaacgttctcttgcgcttcgccgtacatacgtaccagaccgtcatgcatgatgacagcgacttcgtacgcgtaagacgggtcgtaggagatacagttcgggatagtcagcgactgaatgtggctgtgaccatcttcgtgctgcagaccttcgccgttcagcgtagtacgaccggaagtaccgccaatcaggaagccgcgagcctgctgatcgccagccgcccagcacagatcgccgatacgctggaagccgaacatcgagtagtagatgtagaacggaatcatcggcaggtcgttggtgctgtaggaggtcgcagcagccagccaggatgcgcctgcgcccagctcgttaataccttcctgcagaatctggcctttctcgtcttctttgtagtatgcaacctgctcacggtcctgcggggtgtactgctggccgttcgggctgtagataccgatctgacggaacaggccttccataccgaaagtacgcgcttcatcggcgatgatcggcaccagacgatctttgatcgacttgttcttcagcatcacgttcagggcacgaacgaaagcgatagtggtagagatttctttgttttgctcttccagcagcgcgctgaagtcggccagagtcggcagctccagtttctcagtgaatttcggctgacgagtcggcaggtagccgttcagcttttcacgttgagcgtgcaggtaagtgtgctcttcggaaccttccgggaaggtcacgtacggcagtttttcgatatcggcatcagccaccggcacgttgaaacgatcgcggacgtagcgaacgccgtccatgttcattttcttaacctggtgcgcgatgtttttaccttccgcggtgtcgcccataccataacctttaatggtatgcgccagaatcacggtcggctggcctttggtttcctgcgcttttttcagtgcagcgtagactttcttcggatcgtgaccgccacggttcagggcccagatctgctcgtcagtccagtcggcaaccagcgcggcggtttccggatatttaccgaagaagtgctcacgaacgtaggcgccgtctttggatttgaaggtctggtagtcgccgtcaacggtttcgttcatcagctgaatcagcttaccgctggtgtctttacgcagcagctcatcccaacgaccgccccagataaccttgataacgttccagccagcaccaccgaagatgccttccagttcgttaatgattttaccgttaccggtgaccgggccgtccagacgctgcaggttgcagttgatgacgaagaccaggttatccagtttttcacgggtcgcgatggtgatagcgcctttagattccggctcatccatctcgccatcgcccaggaaggcgtaaacggtttgcgcagaggtgtctttcagaccacggtgttccagatatttcaggaatttagcctgatagattgcgcccaacggccccagacccattgatacggtcgggaactgccagaattccggcatcagtttcgggtgcggataagaggacagaccattaccgtgaacttcctgacggaagttgttcatctgctcttcagtcagacgaccttccaggaaggcacgtgcatatacgcccggagagatgtggccctggaagtaaaccagatcgccgccgtctttctcagtgcgcgcacggaagaagtggttgaagcaaacttcgtagaaggtagcggaagactggtaggatgccatgtggccacccagctccagatctttcttcgatgcgcgcagaacggtcatgatggcgttccaacggatcgctgaacgaatacggcgttccagctccagatttcccgggtattccggttcatcttcaacggcaatagtgttgacgtaattatgcgctgccgcaccggccgctactttcacgccgcctttgcgggcctcagaaagaagctggtcgatcagatactgagcacgctcaacaccttcttcacggatgaccgattcgatcgcctgttgccagtcgcgagtttcgatcggatccacgtcattctggaaacgttctgacatgggggtattccttatctatctaatcgttgatttaactggaacctgtcccattgaactctttagcgtttcactctgatgaacaaccaagaattcaataagacaggttctgcgtttagttgccgcgctctaaaaaatggcgcttaagaaccggagttctcgtcctttcgttgctgtaaacgacgcagtgaacgttctctacgactctgttcacggctacgatccagcaaaatttcctcaatgaacgccaggtgacggtgcgacgcctcacgcgcctgctccggctccccggccattatcgcctcgaaaatgcgagtacgatggttgctgaccaacgggagcatttcccggcgggcatacagcaattcaaagttctgacgaacgttttgtgccagcatcggctccatacaccttagcagatggagcaacaccacattgtgcgccgcttcggtgacggcgatttggtactggacgacagcgccggattcggcgtcgagatcgccggactgttgggcccgctcaatggcttgatgcagctcgcgaatacggtcgcgatcttcatcattgctgcgcagcgccgcgtaataagccgcgatgccttccagcgcgtgacgggtttccagcaaatcgaattgggattcagggtggtcggacaggagctcgaccaacgggtcgctaaagctctgccacaggctgctttgtacaaaggttccaccgccctggcgacgaagcaacaggcccttggcttcgaggcgttgaatcgcctcacggagcgagggacgggaaacgtcgaactgttttgccagttcgcgttcaggcgggagtttttcaccggggcgcaacgtcccctcaagaatcagaaactccagctgctgctctatcacatcagaaagttttggttggcggatcttgctgtaggccatattccctgtctctgccattcgcccggagtcaattggtcttaccaatttaaagttcgtagcgctaaagtaacaaagtattcacctcctgtccatacaggttttgattgaaatcagtaaacctggccttttttaacaaccatacagaaataacgtttcagaaatgtaaccttgcacaaaacttacatttacccagcaaggggtagcattaactttatataaacgaaaaataacgctttccgaaccgattcaagaagcaaaaaagtgcatttataaaccaataaagtgaatagataaccaattaagggtagcggcggcgatggtaagaaaaaatgacaaacggtgtctttttgttcgttccgtcatcatcccttcataaagcaggtgcattcgcacgcccttaccattattcttcatcaggcgaaaggtctttgagggaatttccgctttgctttccgtaaagaaatcaatacaaaaatggaatttcataattacacaaacacaacaatgtgtgcgttgcgtcactcgggtaaaaactgacctcaaacgccttgaaattagctaactatgctatttggcagagacggacagcaaggcagcaacctgaaggatgaagcgtataaacataataaccacacacgaggtttcatgatggaaggtcaacagcatggcgatcgactcaagcgcggcttgaagaaccgccatatacagctcattgcgctaggaggcgctattggtacgggcttattcctgggtagtgcgtcagtgattcaatctgcaggtcctggtattattctcggttacgctatcgccgggtttatcgccttcctgatcatgcgtcaactcggcgagatggtcgtcgaagaaccggtagccggttcattcagccattttgcttataaatactggggcggctttgccggctttgcctccggctggaactattgggtactgtatgtgcttgtcgccatggcggaactgaccgccgtcggcaaatatatccagttctggtggccggaaatccctacctgggcctccgcggcggtcttcttcatcgccattaacgccattaacctgaccaacgtaaaagtgttcggcgaaatggagttctggttcgcgattattaaagtcgtcgcggtagtggccatgattctgttcggcgcctggctgttgttcagcggcaacggcggcccgcaggcgacggtcagtaacctgtgggatcagggcggtttcctgccgcacggcttcaccgggctggtgatgatgatggcgatcattatgttctccttcggcggtctggaactggtgggcatcaccgcggcagaagcggacaacccggaaaagagcatcccgaaagccaccaatcaggttatctatcgtatccttattttctatgtaggctccctggccgtgctgctctccctgctgccgtggacgcgcgtcaccgccgataccagcccgttcgtgctgatcttccacgaactcggcgatacgctggtggcaaacgccctcaacatcgtggtgctcaccgccgcgctctcggtttacaacagctgcgtgtactgtaacagccgtatgctgttcggcctggcgcagcagggtaatgcgccgaaagcgctgctgactctcgataaacgcggtgtaccggtcaacaccattctggtgtccgccgtagtcaccgcgctgtgcgtgctgatcaactacctggcgccggaatcggcgttcggattgctgatggcgctggtggtctccgcgctggtgattaactgggcgatgattagcctcgcgcacatcaaattccgtcgcgctaagcagcaagaaggcgtgaaaacacgtttcccggcgctgttctacccgctgggtaactggatatgcctgctatttatggtcgcggtactggccatcatgctgatgaccccgggaatggcgatttcggtgtggctgataccggtatggattgccgttctcggcgttggctatctgtttaagcagaaaagcgccggcgtcgtaaaagcacaataatacatctcgtcacgccgtgtccgtcctcgagcgacgggcacggcgcattgttatctgcttcacactttccttcctgtaacagttttatccatatcgatgacggattactgcaacgtaattcccgacgctaagaccaataattctctccagactgcaatggagagttccaggatgacaggcaatacactttcgctgaaagaaaagattggctacgggatgggcgatgccggatgtaacattatctttggcgccatcatgttgttcgttaactatttttatacggatatttttggtcttgcgccggcgctggttggggtgctgctgctttcggtgcgcgtcatcgatgccgtcaccgacccgatcatgggggcgatggccgaccgcacccgcagtaaatatggccgctttcgcccatggctgctgtggatggccttcccctacgccctgttcagcgtgctgatgttcaccaccccggaatggacctacaacagcaaggttatctatgccttcgtcacctacttcctgctgtcgataacctataccgcgattaacatcccctactgctctttggggacggtgatgacatccgacccgcaagaacgtgtcgcctgccagtcataccgctttgtgctggtcggtatcgcgacgcttctgctctcgctgactctgttgccaatggcggagtggttcggcggcgccgataaagcgaaaggttatcaaatggcgatgaccgtattggcgttcatcggcatgtgtatgtttttgttctgcttcgccaccgtacgcgagcgcatccgtcctgcggtacaaaccaacgacgagctgaaaaaagacctcaaagacgtgtggaaaaacgaccagtgggttcgcattttgctcttaaccctatgtaacgtttgccccggctttatccgcatggccgccaccatgtactacgtcacctgggtgatggggcaaagcacccacttcgccactctgtttatcagccttggcgtggtcggcatgatgatcggcagcatgctggcgaaagtgctgaccgaccgctggtgtaaactgcaggtctttttctggaccaacattgtactggcagtcttctcctgtgcgttctacttctttaatccgcatgccacaacgctgattctggtgctctacttcctgctcaatatcctgcatcaaatcccgtcgccgctgcactggtcgctgatgtccgacgttgatgactacggcgagtggaaaaccggtaaacggatcaccggcatcagcttctccggtaacctgttcttcctgaaagtggggctggcggtcgccggggccatggtgggtttcctgctgtcgtggtacggctacgatgccggcgcgaagcagcaaagcgcctcggcgctaaacggtatcgtactgctgttctcagtgatccccggcgttggctacctgattaccgcaggcgtcgtacgcctgttgaaagttgaccgtgatctgatgcgccaaatccagagcgatctggaaaaacgccgcagtaactacagcgaactgaatgaactccaggaattgaaaaccagtgaacacgtaaggaaagcctgatgaacaactggccgaatccctttattgaacaacgcgcggacccttttatcctgcgccatcacgacagctactattttattgcctccgtgccggaatacgatcggctggagattcgccgcgccgccacgctggaaggcctgcgtgaagccgagccggtgaccgtctggcgcaagccgcaaagcggtccgatgagccagctgatctgggcaccggagctccactacatcgacggcaagtggtatatctatttcgccgccgccccgacccatgacctcgacgcccaggggatgttccagcaccggatgttcgcccttgagtgtaccgacagcgatccgctcagcggccgctggcaggaaaaagggcaaattatcaccccgttcgataccttcgccctcgatgccaccactttctgccatcaagggaaacgctggtatttatgggcgcagaaagacccgcagatcgccggcaataccaatctctatctggcggagctggaaaacccgtggacgctaaaaggcacgccgatcatgctgagcaagccggagttcgcctgggaatgccggggatttatggtcaatgaggggcctgcggtgctggtacacggcgataagctgtttatcagctattccgccagcgcgaccgatgaaaactactgcatgggattattatggatagatattcaggccgatccgctacagccggctaactggcacaaatccccgcagccggtatttcgcaccagctacgaaaaccgccagtatggtcccggccacaatagctttacgcaaacgccggagggggaagatgtgctggtgtaccacgcgcgcaactacaccgaaatcgaaggcgacccgctgtacgatcctaaccgtcacacccggctgaagttagtgcgctggcaagaaaacgggatgcccgacttcggcatcccgcctgctgatacgctgtagcgagtgaacagcgagccgtccgggatccaataccaccactgggattttccctgcttgcgctgcgcttagcagggctaccgcttctgcgcttaccgggccgcggagcgtaggccggataagcgcagcgccatccggcgacatgagtgcgccaagcctagcagcgccaggcttcgggccgttaaatcaacgttccgtagatggtcagcagcgccataatcaccaccaccaccagcgaggttttcttcgccatggaaaccgccgcttttggtgtctcaaccgcatcgacgtgcggctcgcgggccaatgagaactgggccagacgagttaatacctgatactgtgaagagtgacgatcgcctagcgaggcaaaccacgccggcagcgctttttcgccgtgccccagcagcgcgtataccacgccaaccaggcgcaccggcacccaatcgacaatatgcagaataccgtcaatgccggactgtaaacgatggcgcggcgtctgatagcgcgcaagccaggtctgccaggcgcgcaggacgctataagcggttagcgtcaacagcccccacgggccgccgaccaccagccagaacagcggcgcgagatagtagcgatagttgatccatagcagtgcgttttgcagctcgcgaagatactcctgacgatcgcagcccggcggcacgccgtgaataagcgttagctcgctggccatagaatcgcaggcgtggctatcgttgttcgccgccgccttcagataggcatgataatgcaggcgcaccttgcccgcaccgatacacagcaggccgagcaaaatccagaacaccagcagcggtacgttaaatagctgtccctgtagcaggcgttgaataacgtataccaccgccaccgcgacgacggtcatcagcacggtgccgaacagcgagaaatgcttcacgcggcggaacagtacctccaggcgatgatcgagctgccagtgctcaccaagcttgaacagacgctcggcgatgagaaccagcagcgtagtaaacaacgtcatggtatctccttatgtgacgatgcggccaacataccgcggtattttgcccaatcaaaggccgggccgggatccgttttacgtatcggcgcgatatcgcaatggccggtaatattatcagcaataccaggataacgctggataagcgcctgggtaatcaccactaactgctggtactgcgcctcggtgtaagcctgagtatccgtcccttccagctcaatgccgctcgaaaaatcattgcagcgctcgcggccgtgatagctggagacgcccgcatgccatgcgcgcttatcaaagggtacatactggactatctcgccatcgcggcgaatcagacaatgcgccgaaacgcgcagatgagcaatcccggcgaagtaaggatgcgcgtcggcatccaatgtaccggtaaatagcgcgtcaatccacgggccgccaaactcccccggcggcaggctgatattatgtaccaccagtaaagaagggttttcatcgtccgggcggcaatcgtgatgcggcgaaggcacccgacgcgcgcccaccagccatccgccattcaactgcatggggaatctcctttcgcaaacgtggatcccggcggccccacaggcgacgcgaaatccattgggtatgtgtggtacagaaacgtggttcaggttagcatgtttcccacttctgaatcttatctatctggagctttatcatgacgcctcgtcgctacagccccgaccgccgccgtgacgcgctgctggaacgtattaatctcgatattaccgacgccgtcgcgcaatcactacgcgaagatctgggcggcgaagttgacgctaacaacgatattagcgcgcaattactgccatcggacgcgcgctctcacgccgtcgttatcacccgcgaagatggggtattctgcggtaagcgttgggtagaagaagttttcattcagcttgccggcgacgatgtcagcatcacctggcacgtggctgacggcgatacggtaaaagccgatcagccgctgttcgaactggacgggccgtcgcgggtgctgctgaccggcgaacgcaccgcgctgaatttcgtgcagaccctctccggggtagcaagcgaagtacgccgctacgtcgacctgctcaaaggcaccaaaacgcaactgcttgatacgcgtaaaacgttaccaggcctgcgcaccgcgttgaagtatgcggtgctgtgcggcggcggcgcgaaccaccgtctgggcctcttcgacgctttcctgatcaaagaaaaccatatcatcgcctctggttcggtacgtcaggcggtggaaaaagccttctggctgcacccggacgtaccggtggaagtcgaagtcgaaacgctggatgagctggatgaagcgttaaaagccggcgctgatatcatcatgctcgacaatttcaccaccgacctgatgcgtgaggcggtgaaacgtaccaacggccaggcggcgctggaagtctccggcaacgttaccttcgataccattcgcgaattcgcggaaaccggcgttgactatatttccgtcggcgcactcaccaagcacgtacgggccctcgacctgtccatgcgttttcgttaattctctccccgatatccaccgggtatcggggttatttttgcgagacgcctcgcacgcttcccgcgcatctttgaaaatgctaccgaaaagctggatgcctgcatcctaagcgtatttttcctcctcgccgccgcgacgtaatcgcgccaaagtcaccccacaaccaacaaggagtgacttatggataagcaacgtggttttaccctgatcgaattaatggtggttatcggcattatcgccatcctcagcgccatcggcatccctgcctaccaaaactacctacgcaaagccgccctcaccgatatgctgcaaacctttgtgccctaccgcacggcaatagagctgtgcgccttggaccacggcggactaaccagctgcgatggcggcagtaacggaatcccttcaccgtcgactacccgctatgtatcagcgatgagcgtcgcccagggcgtggtcacgctgaccgggcaggagagtctgaacgggctggccgtcaccctgaccccttcctgggataacgccaacggtatcaccggttggcagcgcgtctgcgccatcagcgatgacagcgcgttaaagcaggcctgcgaagatgtcttccgctttaaccgaggtgacagccatgaaaaccgaacagctactctcactctgtcagcgccatcacgcactgttgttgaagagcgacgagcagaccattgttatcgccgttgtggatacgccgtcgccagaactgatggaagcgctgcgcttcgctacccaaaagcgcatcgatattgaatgctggagccaggagcggatggataagcatcagcatgaggcaccgcggtcagcagcagactccgccacgggtaacccccagggcgtaaccgatctactgaatcaaattctggagcaggcgctgcgccagcgagcctctgatatccatattgagccggcggaaaatcagctgcggatacgcctgcgtgtcgatggcgtgttgcatgccctaccgttacttgaggccgcgctggctgcgccaatagccgcacggcttaaggtgctgggcaacctcgatattgccgagcatcgtctaccgcaggatggacagttcactctgacgcttaccgggcgcacggtctcctttcgcatcgcaaccctcccctgccgcggcggggagaaaatcgtcctgcgtttattacaccaggtggagcaggcgctggatctggaagctctggggctctcctctcgtcagctggcttttttccgcgccgcattgaaccagccgcaggggttgctactggttaccgggcctacggggagtggcaaaaccgtcaccctgtacagcgcgctgcaggcgcgaaaccgcgaagaggtcaatatctgcagcgtggaagatccgctggagatcccgcttaccgggctcaaccaaacgcagatcaacccgcgatccgggcttaccttccagagcgtcctgcgggcgctactgcgtcaggatccggatatcgtcatggtcggagaaattcgcgatgccgagaccgccgaaatcgctattaaggctgcacaaaccgggcatctggtgctctctacattgcatactaactccaccagcgaaacgttaattcgcctgcaacaaatgggcgtagcgcgctggatgatctcctcggcgctatcgctggtggtcgcccagcggctggtacgaaaactgtgcccccactgccggcgcgatggcggccgccctaccgaggtgccgcacagtctttggccacgcccattacccggctggctggcggttggctgcccacagtgctaccacggttactacggccgcctggccttattcgaactgctgccggtggatagcgcgctgcgtcaggccattaatcgcgatctcagcgcggcggaaatcgaaacgctggcccgcgaagccggcatgatgacgctgtttgaaagcggctgtgaagcggtggagcgtggattaaccactcttgaagagattatccgagtgctggggatccagcatggcgactaagcagctttggcagtggcgggggatgaataagcaaggaatgcagtgtgagggcgtcctgtggcacgagacgcgcgcgcaggcgctggcatcactggaacagcagcggatcctgccgctggagctgcggcgtaaaacggtacagaattcgctgtggcgcccgcgctacagcggtgaggttatccgccagcttgccacgctgctgcaggctggtttaccgctggctgaagggctggagctgctggcccaacaacagccgcacaaacagtggcaggcgttgctacgagtgctggcgcaggaactggcaaatggcgtttctctctccagcggcctggcgcaatggccgcaggtcttccctccgctctatctggcgatgatccgcaccggcgagctcaccggtaagctggaacgctgctgctttcaactcgcgcaacagcagcaggaacaacagcgtctgacagaaaaggtaaagaaggcgctgcgctatccgatcgttatcctgacattagcgctggcgctggtcgtggcgatgctgtttttcgttctgccggaatttaccgccatctatcggaccttcaacacgccgctccccttgctgacgcaaatggtcattcaccttggcgacgcgttagcccgctactggccgttgctgccgcctttttttgctattccactatttctcaaccggctggcccggcggcggccacgctggctgctgttaaggcaaagattatttcacgcgattccaatagcgggtcggctgctcaacggtcagcaactgagccaggtatttaccattctttcactgacccaaagcgcgggtataagctttgtccaggggctggagagcgtcgaggaaaccgtgggctgcccgctgtggcggcagcggattgcacaggcgcgcgcagagattatccatggccaaccaatctggcaggcgctaacgaattgtggcggatttacctcgctgtgcctgcagctcattcgtaccggcgaggcatcaggagcgctggatacgatgctcgataacctggcgcgccatcatagcgagcaaactcatcaacaggcggataatctggcgacgctgctggagccaatactgctggtggtgaccggaacgatcgtcggtgtgctggtggtagcgatgtacctacctgtttttcatctgggggacgcgctgggcacaatggggagttaatggctggcgccagagcgccagccatcgtcattacaggctgttgaacacgcggttctcttgttcttgtacgcggataaaggttgtacgtttggtcagctctttcaggcgggaagcgccaacataggtgcatgctgaacgcaggccgccgaggatatcacgcgcggtattatcaaccgggccgcgcagcggcaacttaacggttttaccttccgcggcacgatatttcgcgacgccgccgacgtggcgagtcatcgccgattcagagctcatgccgtaaaacagcatgaatttttcaccgttctcttcaaccacggtaccgccgctctcttcgtgacccgccagcatcccgccgagcatgacaaaatcggcaccgccgccaaaagctttcgcaacatcacccggcatggtgcagccgccgtcgctgatgatctggccgccgagaccgtgcgcggcatcggcacattcaatcaccgcagacagctgcgggtagccaacgccggttttcacgcgggtagtacagacggagccagggccaatgcccactttaacgatatcagcgccggagagaatcagttcttcacacatttcaccggtcaccacgttgccggcgataatggttttttgtggccaggcggcgcgcgctttcgccacaaactgaacgaagtgttcagagtagccgttagccacgtctatgcagacgaagttcagctgtggattctgggtcaggatctgctgagttttttcaaagtccgcgtcagaggtaccggtggaaaccatcacatgctgcagcacttctgcggactcgctctgcacaaacgcctgccattcttcaacgctgtagtgtttgtgcacggcggtcagaattccaaaagcggacaaggctttcgccatgctgaaggtaccgacggtatccatgttagcagcgataatcggtacgccggaccaggtctgacctgaatgcttaaaggtgaattcacgttccagttgaacatcagaacggcttttgagggtagagcgtttcgggcggataagaacgtctttaaaacctagcttcagatcttcttcaatacgcatgtgcgaattcctggggttaattgcattaatgtgagagcacaactccagtgacgctatcatacgcacgaatcatagccgcgcaagactgcgattttcactttttttaagctacaatcgttaaaatttacctggtgaatagcgaaaaacacgttcgtgtgctttccttaccattgcgtcatttttaaccaattgttttttatatataaagtgaatcacaattcacattatggatactttttcgatttaacaaaatcttgattaagctatcctctgggtctgaatggcgcggtgaatcgccagggttttgaacaataatgtgacatcgggattgaagtgtatggggtatacggtagcgttaacaggcggcatcggtagcggtaaaagtaccgtcgccgacgaatttgctcacctgggcgtaaccgtcatcgacgccgatattattgcgcgtcaggttgtagagcccggtactcccgccctgcttgctatcgctgaaaggtttggtccacagatgatcaacgacgatggcagtctgaatcgccgccgcttacgcgaacgcatttttgctcatagcgaggacaaggcctggcttaacgcgctgctgcatccgctgattcagcaagaaacgcgccgtcagatgcagtcctcaacctcaccttatctcctctgggtcgtacccttgctggtcgaaaaccgcctgaccgataaagccgatcgcatactggttgtcgatgtgccaaaagagacgcaaatcgagcgcaccatacgccgcgatggggtcagtcgtgaacacgctgaacatattcttgccgcccaggcgacgcgcgaacagcgtcttgccgcagcggatgatgttattgaaaacatgggctccgcggatgccgtcgcatcccacgtcgcccgcctgcacgataagtatttaatgctggcatcgcaggccgcctcacaggaaaaaccgtaatgcatacccctgttctcttcgaacatccgctcaatgagaaaatgcgcacctggctgcgcattgaatttttatttcagcagctctcttcccgcccggccattgccagctacgcggacgctctccattttttccgcaataccggcgatctactggacgtgctggaacgtggcgaagtgcgtaccgatttgctgaaagagctggagcgacaacagcggaaattacaaacctgggccgaagtgcccggcgtcgatcagcagcgtattgaagccctacgtcagcagctcaaactgtccggcagcaccttgatctccgctccgcgtattggccagtttcttcgtgaagatcggctgattggcctggtgcgccagcgtctgagcatccctggcggctgttgcggctttgatttgccaactctgcatatctggctgcatatgccgcaagagtatcgcgatgagcaggtggcaaaatggttagcgagcctgacgccgctgatgcagtcgctggagctgatccttgatttgattcgtaactccgcgcctttccgtaagcagaccagcctcaatggcttttatcaggataatggcgacgatgccgatctgctgcgcctgcgcctggatctcgcaagccagctgtacccgcaaatttccggccataaaagccgcttcgccatccgcttcctgccgctggacagcgagcatggtatcgtgccggaacgctttgattttgaactggcttgttgctaaggagacactatgtcagaagagactatcgttaactgcccaacctgcggtaaaaacgtcgtctggagcgagcaaagcccgtttcgccctttttgctcgaagcgctgccagctgatcgatcttggcgagtgggcggcggaagagaaacgtatccccagttccggcgacttatcagacagcgatgactggagcgagccgcagcagtaacctttcccatcgctaatccgggacgttccggattagcgtttcaggcctgcgccgggttgcccggcgctcaggcaagcgtaataagtttattaattatcggctcgttcgccggcggaaatgcctgcggatccaacgcctgctgcgccatccattgccccggttgtccttctttgccccacggctcaccttgccagttttccaccaggaagaaccatagcgtgatatggcggtccgggaattgatactccagtttgtcgaacaacgtggacgtcgtcaccgtaatcccgacctcttcctgcagttcacgtaccagcgcctgttccggcgtctcacctgattctatttttccgccggggaattccagtttattggccatatgcgcgtctgcagcacgctgggtaataaaaatttcgccttgcggattgcgaattatcccgacggcgatttgcagttttttcattgaaacagctccataaaaaaggcgcagaaatctgcgccctggtttgctttttatcagcccttagctcagacggccgtggcactgtttgtattttttaccggaaccgcacgggcacggatcgttacgcccgactttacggtcgccggtctgttcagccagcgaggcggcagccagtgtatcgtcatcctgatggctcagctgctgcatctgcgcgagacgctctgcctcttcgcgacgttgctgttccatctcttcgacttcttccggcatccgcacctgtaccttgctcagcgtgctgataacttcatacttcagcgattcgagcatagcggcaaacatcgagaaggattcgcgcttgtactcctgcttcggatctttctgcgcgtagccgcgcagatggataccctggcgcaggtagtccatcgccgccaggtgctctttccacagggaatccagcgtttgcagcatgacgcctttctcgaagtgacgcatcatttcggcgccgaccacttcttctttacgctggtaggtttctaccgcgctctgcagaatacgttcacgcagggtctcttcgtgcagctccggctctttatccagccactctttgattggcagctcaaggtcgaagtcgtttttcagacgttcctgcaggccttcaatatcccacatctcttccagcgactgtggtggaatatgcgcatcaatagtggctttgaagacgtcttcgcggatgctgttgatggtttcgctcacgtcggagatatccagcagctcgttacgctgggtatagatagcgcgacgctgatcgttggcgacgtcatcatattccagcagctgtttacgaatgtcgaagttgcggctttccactttacgctgggcgttggcaatcgctttggtcacccacgggtgctcgatagcttcgcccggcttcatccccagtttacgcatcatgccggatacgcgatcggaggcgaagatacgcatcagagcatcttccatcgacagatagaagcgggaagaaccggcatcaccctgacggccagcacggccacgcagctggttatcgatacgacgggattcatgacgctcggtaccgatgatgtgcagaccgcctgcggccaggaccgcatcgtggcgcacctgccagtcagctttgattttttcaatctgctccggcgttggattttccagtgcggcgacttccgcctgccagctaccgccgagcataatatcggtaccacggcccgccatgttggtggcgatggtgaccgcagccggataacccgcctgagcgacgatatccgcttcgctggcatggaacttggcgttcaggacgttgtgcttgatgccggctttcgtcagttcgcgggaaaccacttcagatttttcgattgagatagtaccgaccagcaccggctgaccggcagcggtacgatctttaatatcctcgataatcgcctgaattttttccgcttcggtcatgtagaccagatccgccatatccttacggatcatcggacggttagtcgggacgacaacggtatccagtttatagatggagctgaattcaaaggcttcggtatccgcggtaccggtcatccccgccagcttctcgtacaggcggaagtagttctggaaggtgatggatgccagagtctggttctcattctggatttccaccccttctttggcttctaccgcctggtggaggccatcggaccagcgacgcccctgcatcgtacggccggtgtgttcatcgacgatgatgacttcgccatctttcacgatgtagtcaacgtcgcgggtaaacagcgcgtgggcgcgcagcgcggcggtaacatggtgcatcagcatgatgttggtcggagaatacagtgattcgccttcctccatgatgccttcctgcaccagcagctcttcgatcagtaccagaccgcgttcggtcaggttaacctggcgagctttctcatccacggagaagtggccttcaccggtaaaggtgtcggagtcttccttttcctggcggatcaggtgcggaataattttgttcaccttgcgatacatttcggagctgtcttcagccgggccggaaatgataagcggggtacgcgcttcgtcgatcaggatggagtccacctcatccaccagcgcatagtgcagtttacgctgtacgcgctcttccgggctgaacgccatgttatcgcgcaggtagtcgaagccgtattcgttgttggtgccgtaagtgatgtcggccgcgtaggcttcacgcttcgccggcgcaggcaggccggacatattgatgcccacgctcataccgaggaattcaaacaacggacggttgttttcggcgtcacgttgtgccagatagtcgttgacggtaacgacgtgaacgcctttaccggtcagcgcgttaagatacgccggtaacgtcgcggtcagggttttaccttcaccggtacgcatctccgcgatgcaacggtcgttcagtaccataccgcccagcagctgcacgtcgaagtggcgcatgccgaagacgcgtttactcgcttcacgcaccacggcaaacgcttccgggatcaggctttccaggctttcacctttctccagacgcgcgcggaattccccggttttggctttcagctcgtcatcagagagcttttccatcgccggttccataccattgatgatgttgacgactttgcgcatacgacgcagcgtacggtcgttacggctaccgaacactttagttaacattttaattagcataataaaatctcaaacgccccgcggtgcggagtcaaaaaaataggatggtccgtgtttattttcagctgagacgttgaggccctgcgcggatccccgctacctggcttatccaggcgctgacgcggaaggcagaataagaagaagggatataagccgcctggcggataaccaccggcggtttgctatcctgggtcagcagcgcgctgagcgtatcgagcagggccagatgctgggcctgcagcggcgatgattcttccgccaccggcaaagcctgcggcgccatcgcaaacgacagatggcgaatgacggtgcgaatcgcatgctgatgccagtagtcgacggtaaagttcggccgacgattggcctccagcagcgccagctgggagaagttaactttattcggattatggttgctggccgtggctttcgccggcgtagtggtttcgtggctgttgttaagcgcaggcaggccgaggctagccgcgaccatccccaacaggagatgcggccaaaaataccgtctgccaaactgtcgccaacgcgtcagcaatccactcactttctttacctttagttggtattcctgcgtcctttcaggcggtccattttattggcggtcttcgcagtacagcctgaaatcgacaggataaagcaacccagagaaaaattttgcgcccaaatactaacattaataccgcgccgagacagcaggaatgaacgctaatgctgcgggaaaacgcttaataaagcagcgaacgcgcacatattattgccagcgaaacacagtgaaaagcggtttagggaggctaaaaagaaaaacgactggttccctggacggagagagtaccaggttaccagtcgattttactgaatggtcaggcttacgccagaaccattgacggtgcgcggaatgccagcggcagttttgcgtcgtcttcgaaggtcacatactcccaggcttcctgttttgccagaacagcctgtagcagtttgttatttaacgcgtgaccggatttgaacgccgtgaatgcgccgataatgttgtgaccacacataaacaggtcaccgatcgcatccagcattttgtggcgaacaaattcatcttcaaagcgcagaccgtcttcgttcagtacgcgataatcgtcaacaacgatggcacaatcgaagctgccgcccaggcacaggccacgggactgcagatattcgatatcacgcatgaaaccgaaagtacgagcacggctaatctgacgcatgaacgcatcggccgagaagttcagcgcatagcgttgggtgctggagtcgatagccggatggttaaagtcgatggtaaagtccaacgaaaaaccattatacggcttaaactcagcccatttgtcgccatcttcaacgcgaaccgtctctttgatacgcacaaatttcttggcgctgttcagttcatcgatgccggcatccagcaacagataaacgaacggagcggcgctaccgtccataatcgggatttccggcgcatcgacttcaacaataatgttgtcgatgcccaggccagccagtgcggcatttaagtgctcgactgtagaaatccgcacgtcatgctcgttcaccaggcaagtacagagcatggtatcacgcacagatttggcatcagccggaaaatcaaccggtggattcaagtcggtgcgacgatagatgaccccggtatttgccggcgcagggcgtaaagtcagcgtgactttcttgccggtatgcaaaccgacaccagtcgcctgaacaatacgtttaagagtcctttgtttgatcatcgtataatctcgccaagttacctatccaaccgaagtgtactatacattcggcagggcagtttagcacaaagagcgcagatgcccaacttccagccaattcttaatcagcttgcttacgcaggaaagctggaatatccagataatccggctctttcgcggtttgcggcgtattgtcgttcaccactttcgcgaccggtttctgctcttgcgttaatggagccataccgtgctgctggtagcgatccattaccggctgctgtacctgtttgttggtcaccagggtaatttccggacgcttgtccataccgataccggtagcaacaacggttacgcgcagctcgtcgttcatatccgggtccagagaggtaccgattaccacggtcgcgttatccgaagcaaaggcgcggatagtgttaccaacggtttcgaactcatccagacgcaggtcgaagccagcggtgatgttgaccagaacgccgcgcgcgccggacagatcgatatcttccagcagcggagaagagatagccatttcagccgcttcttccgcacggtcttcaccgctcgccacgccggagcccatcatcgcgtagcccatttccgacatcacggtacggacgtccgcaaagtcgacgttcatcagacccggacgggtaatcagttcggcaataccctgcaccgcacctttcagtacgtcgtttgccgcgccgaaagcgtcgagcagagagataccgcggcccagtactttcagcagcttgtcgttcgggatggtgatcagtgagtcaacgtgcttggacagctcggtgatcccctgctcagcaaacgccatgcgcttcttgccttcgaaattaaatggcttagtgacgaccgcaacggtcaggatacccagatccttcgccacttccgcgaccactggcgccgcaccggtaccggtaccgccgcccatacccgccgcgataaagaccatgtccgcgccatcaagcgcagcgcgcagcgcttcacggtcttcgtctgccgcattacggcccacttccgggttcgcgcctgcacccagacctttggtaataccgctaccgatctggatagtctggccaacagccgttttacgcagcgcctgcgcatcggtgttcaccgcgaagaattcaacaccctcaatgcgctcgcgcaccatgtgttcaacggcattaccgccgccgccaccgacgccgatgactttaatcaccgcgtcgttggtcagttccataggttcaaacatagtttctctccgtcttgtgcctgtcgcctgagaacgctaattgtctgcgttctcttaaaaaattaaaactcttttcgcagccagctgttgagtcgcttaatccacgagcccactgacgccgtcacgcgtttttctacttctgcttcaccactgagatgtgactcttttccgtagtgcagcagcccaaccgccgtcgaatagtacggctcctgagcgtaatccgttaaaccggtgatgttcagcggcgcgccaatgcgcacctgcgtatggaacacgcgctgcgcgcaggccgccaggccttcaatttgcgcggcgccgccggttaatacaatccccgccgccagatggtgtttgaccccttgctgacggagctgttcctgcaactgcaggatttcttcgttaaccagattgagcagttcggtataacgcggttcaatcacctctgccagcgtctgacgctgcaggctgcgcggcggacgtccgcccacgctcggtacttccacgttttcgtctttaccgacgattgaacctaatgcgcaaccgtgacgaaccttgatggcttcggcgtcgctcggcggcgtaccgaaggcataggcgatatcgctggtcaccacgttgcccgcgtaagggatcactttggtgtgacgcagcgcgccgccggtatacacggcgatatccattgtaccaccgccgatgtccacgacgcagacacccagctcacgttcgtcttccgttaatacggaataactggccgctaaaccggcgaaaataagttggtcaactttcaaaccacaacgttcaaccgctttaacaatgtttttcgccatatcgttatggcaggtaatcagatgtaccttcgcctgcatacgcacgccggataaccctaccgggtttttaataccttcctggtagtcgatggcgtattcctgcgggatgacgtgcagtacgcgatgttcgtcgcgtacgcgtaccgatttcgcggtatgaacgacgttttccacgtcatcctgcgtcacctcttcttcggagataggcaccatgccaatctcattttgacagctaatatgcttacctgaaagcgccagatacactgatgagatctggcaatcggccattagttcagcctggtcgatagcgcgctgtacgcatttcactaccgactcgaggtcattcaccccgcctttatccatgccgcgcgatgggcaactgcccacgccaatgatattaatcataccgtcgggcagaacttcccctactaaagcggcaaccttcgcggtgccaatctccagtccaactaccagttttctgtccgtcgccttgatcatcgttgttctgcctgtgcctgattctgttgttgattattttcctctacgggagcaggtacccaacctaccgccgcacccgagtcatagcgcaaatcaacgtagcttatccgtttgccgtcggtctgtgcctgctgctgaagaaccgggtagagttccataaagcgctgaagccgtttcatggtgtcgccgcggccaaggttgagcttaatatcgttattaagcgtcaactgccaggagcgacgcgcggtcattgccgccactttcaacgtgaacttattctttgccagcacctgtcccatgtcgcggtatccctgcagcacttcattttcgctgccttccgggccgtataacatcggtaagttctgtttgctggtacgatccgccggcacgctgaaagaatttccttcgacgtctaccatatgttgatcattccagcgcgcaatcggcacatattcaaccagatgaatcttcaattcatcgggccattgttttcttacgctcgcctgtttaatccacggcaggcgctcaatttggctctggatgatgttgacatcctgagtcataaaggtgcccggcgagcccaacgccagaatagcctgacggatatcatcgttacgcgtgtagtgacgttcgccggtgacgaccattttcgacaacggcagacgctgcgcatcttccatccaaccaagaaccatccatccgctgaccaacacggtacacaacaccgccagcaggaaaacgatccctgccagccgggttccattattccgacgcgaagaagcaatcgattcttcttcctggttccgcgtattcagcgccgcctgcgacatatcaccccgccaggtccagaattcgtacaacaagctgcgagaagctcatccccgcctgacgggccgccatcggcaccagactatggctggtcatccccggtgaggtgttcgcttccagcagataaaactggccatcgctgtccagcatcacatcaatacgtccccatcctttgcaacccagaacattccaggctttaagcaccaggctctggatttctgactcgcgggcgggttcctcaaaaccagggcagaaatattgcgtctcatcagagagatacttcgcctcataatcatagaaggttccagccgtctggatacgaattgacggtaaaatttcttcaccgacgatagcgacggtaaattccgggccactgagccatttctcaatcagaacttcatcatcatgctgaaaagccagcgccaatgcatcctgcattgcacaactttcgctaactttcgacatgccgacgctggacccttcgcggctcggcttgataataaccggcagccccagcgccgcaatctgctcagaaacgccagcagaaagtcctgcgttgaactgcgcgcgggtcaatgcaacccacggcgcgaccggtaatcccgcaccctgccacagtaatttactgcgcagcttatccatagaaatagcggaagccattacgccgctgccggtgtacggcagttgaatgagctcaagaaggccttgcagcgtgccatcttcgccgccgcgcccgtgcagggcaataaacgctttcttaaagcccatgttcttcaactgggtgatatcaacgtcgcgcggatcgaccgggtgagcatccaccccgccttcacgcagcccggccaacaccgcagcgcctgaattcagcgagacttcacgttcagcggaggttccgccgaagagaaccgcgattttatcagccatgtcggtcctcctccgttttttgcggtaccagtttgatttcagccaggtgacgtgcgatttttcctatgttgccggcgccctgcaccagcaccagatcgtcgccggtcaataccgatgccagcatctccgcggcctgcgccggatcggaaaccagaatcgggtcaactttgccgcgaccgcggatcgtgcggcacagcgagcggctatcggcgcctgggatcggcgcttcgcccgccggatacacatccagcatcagcagcgcatcaacctgggtcagcacgttggcaaaatcatcgtacagatcgcgagtacgggtataacggtgcggctggaataccatcaccagatttttatccggccagccggcacgcgccgctttgatagtggcgtcaacttccgtcggatgatggccgtaatcgtcaattagcatcgcgctaccgctcttgccgttgacttccgccagcggatattcgccaaggaagtcgaaacggcggccggtgccctggaaactctccagcgcgcgcagaatcgcctcgtcttcaataccctcttccgtcgcgacggcaacggccgcggcagcgttgagcgcgttgtggcgacccggcgcgttcagcgtcacctgcatgacctctttatcctggcgtaccaggcggaaatggccctgcgcgcccacctgacgatactcttcaatgcgtacgtcggcgtcatcgctaaaaccataggtggtgatttggcggccgacgcgcggcagcagttcacgaatcaccgggtcatccacgcacatcaccgcgcgcccgtagaacggcagattgtgcaggaagttaataaaggtctgcttcaggttctcgaagtcgccatgataggtatccatatggtcagcttcgatgttggtcacaatggcgaccatcggctgcagatgcaggaaggacgcatcgctctcatccgcttccgcaatcaggtagcggctatggccaagacgggcatgtacgcccgccgccttcaccagcccgccgttgacgaaggtcggatcgaggccggcttcggcgtaaatgctggataccatcgcggtggtcgtggttttgccgtgcgtaccggcaatcgcaatcccgtgacggaaacgcatgagttccgccagcatttccgcgcggcggatcaccggaatgcgcgcttcgtgcgcagcgacgatttccgggttatccgcggagatcgcgctggacaccacgacaacgctggcatcgcgcacgttttccgggcgatggttgaaataaatggtggcgccaagctgcgacaattgctgagtcaccggattcggcgcgagatcggagccgctaatctggtagccttcattcgccaacacttcggcaataccgcccataccggcaccgccgatgccgacaaagtgaatgtgccggacgcgacgcatctcgggcactatggaacgcagttttgccaaatcttgtgtattcattctttacgccatcaacttctttattcgggcggtgaaaatcaccgcgattagcgcgccaaagctacggcgctgacctcttccgctacccgctcggtagcatccggaatcgaagcgccacgcgctcgttccgccatatccatcagggtttcccgatcccaaccggccagggtggccgccacagcatccgccgtgaactcgggttgttcgagaattttcgccgcgccggctttttccagcggcagcgcattccagtactgctgacgatctttgtgctggaacgggacgaacaatgccggtaaacctgcggcggcgatttcgctgaccgtcagcgcaccggaacgacaaacaaccacatcggcccaggcataggctgccgccatatcatcaataaactcagtcactttatgctgcggctgaccggcggcggcgtacgcctggcgcacggtatccatgccgcctttcccgctctgatgccagatagtcaccgcatcgccaagcttcgcggccacctgcggcatagtctggttcagcacgcgtgcgccctgagagccgcctaccaccagcacgcgaatcggcccctgccgccccaccagacgctgtcccggcagcggtagcgcgagaacgtcagtacgcaccggattcccgacgacatctgcatgcgggaaggctccgggaaacgcctgcatcactttcttcgcaatcttcgccagccatttattggtcaggcctgcaatgccgttttgttcatgcagcaccacagggatcccgagtgaccatgccgccagaccgccaggcccggaaacataaccgcccatgcccagcaccacatccggctggaaacgcttcatgatcgcccgcgcctgccgccaggcgttgaagatccgcaccggcgctaacagttgcgcttttagccctttgccacgcaggccggagatgcggataaaatcgatatcaatgccgtgtttcggcactaaatccgcttccatacgatcggcggtgcccagccagcgaacctgccagccctggtccattaaatggtgcgcgaccgccagccccgggaacacgtgtccgccagtgccgcccgccatcaccattaaccgcttttcctgaccgctcatcgaacaccccgtgtaaacgcctgcgctttctcgaggcgcgtttcataatcaattcgcaataaaaacataatggccgtcgacataatcagcagactggaaccaccataactaatcaatggcagggtcagacctttggtcggcagcatccccgccgccgccccgacgttaaccaacgcctggaagctaaaccacacgccgattgcacaggccaggaagccggagaagcggtggtcaatctccagcgctttgcgaccaatcgacatggcgcgaaaggcgacgaagaataccattaaaagcgcgagtaccacaccgatataaccgagttcttcgccgataatggcgaagatgaagtcggtgtgcgcttccggtaaatactccagtttctgcaccgagttgccgaggccctgtccccacatctcgccgcgaccaaaggccatcagcgattgggtcagctgatagccgctgccaaacgggtcttcccacgggttccagaaggaagtgacgcggcgaatacgatacggttcggcgaggatcagcagcaccaccgccgagatccccatgccgataatggcgataaactgccagagcttggcgccggccaggaacaacatcgccagcgtggtcacgaacaacacaaccaccgtaccgaggtcaggctgcgccagcagcagaatcgccagtacgaaaatcacgcccatcggttttaagaagccgcgcaggttgttacgcacctcatccgctttacgcaccagatagttggcgatgtagcaaaacagcgatagcttggtaaactccgccggctgaatacgcagcggcccgagcgcgatccaacgcgaggcgccgttaaccgaactccccaccaccagtacgatcagcagcatcacaatcgaggcgatcagcatcgcggtactgtggcgctgccagaactccatcggcagacggagcgtaatcatcgccagcgcgaaggccagcacaatgtacagaccatcacgcttagcaaacaggaacggatcgttcgccagacgctgtccgaccggcattgatgccgaggtcaccatgataaaaccgatcgccgccaggccgaaggtcagccacagcagcatccggtcatacatgaccaggctatcgttatctttcgggcgcgagcccatcacccaacctttcagcgcggcgaacagccaggcaaaaataaacattcccggcagtcgcggcagcttcaaccggggcaggcccagctgtggcattttcaggcgtgggagagagaaacgcatcaacctaactccttcgccagacgggtaaagacatcgccccgttgttcaaagtttttaaactggtccaggctcgcgcaggctggcgacagtaagaccatatcgcctgatttgacctgcgaagcgatctgccgcatcgcctgttccatggtttcggtttgcaccgcgatttccggacgcagccccgccagttgagcgccgtcgcggccgaagcagtacagacgaacgttatcgccgccaagatagcgtttcagcggcgtgaagtcggcggatttaccgtcgccgcccaacagcagatacagcgtgccgtcgagatgcaggccgttcagcgccgcctcggtactgccgacgttggtcgccttggagtcattgatccaacgcacgccgttatgctccagcgccagttggaaacggtgcgccaggccggtgaaggtggtcagcgccttcaggctactggcgcgcggcaagcccgcggcatccgccagcgccagcgccgccagggcattgctgtagttgtgctggccgctgatggtcatttccttcacgttcagcactttctcacccttcacccgcagccaggtttcgccctgctggcggttaaggtgatagtcgccaacatcgacgccgaagctgacgcagcgttcgtcagcgccgcgtaccggcatggtcagcgcgtcatcggcattcaccacgcaggttttagcattttcatagacccgcagtttcgccgcgcgatactgctgcagccccagcggatagcggtccatatggtcctcagtcacgttgaggatggttgccgcgacggctttcaggctggaggtcgtctccaactggaaactggaaagttcaagcacgtacagttcgcgcgccggatccagcaacatcagcgccggcaggccgatattgccgccaacgccgacgttcacgcccgccgccttcgccatctcgcccaccagggtagtgacggtgctttttccgttagagccggtaatggcgataatcggcgcctgcgcctcgcggcaaaacagctcgatatcgccgacgatttccacgccagcgtcggccgcagcgctcagtgaagggtgcgcaagggcaatcccggggcttgcgacaatcagatccgccgccagcagccaatcgtcgttaagaccgcccacgtggcgctcaacggcttccggcagcttatcaagcccggctggggcgacgcgggtatccatcacgcgcggggttacgccgcgcgccatgaaaaagtccacgcatgacaggccggtcatacccagcccaataatgacgacttttttaccctgataatctgccatgattaacgtaccttcagcgtcgccaggccaatcagcaccagcatcagcgaaataatccagaagcgcacgataacgcgcggttccggccagcctttcagttcatagtggtggtgaatcggcgccatacggaagatgcgctggccgcgcagcttgaacgagccgacctgcaggataaccgacagggtttccacgacgaaaacgccgcccataatcaccagcaggaattcctggcgcagcagtacggcgataatgcccagcgcgccgccgagcgccagcgaaccgacgtcacccataaagacctgcgccgggtaggtgttgaaccacaggaaacccaggcccgcgccgacaatcgccgtgcagacgataaccagttcaccagcgtgacgcagataaggaatatgcaggtagttggcgaagttcatgttcccggtggcccacgccaccagcgcaaagccggcggcgacgaagacggtcggcataatcgccaggccgtcgaggccgtcggtcaggttgaccgcattgccggtaccgacgatgacgaagtaagccagcaggatgtaaaacagtcccagctgcggcatcacgtctttaaaaaatggcactaccagctcggtcgccggggtgtctttccccgccagatacagcgcgaacgctacgcccagcgcaatcaccgacatccagaaatacttccagcgggcaatcaggcccttggtgtctttgcgcacgactttacggtaatcatcgacaaacccgatgatgccgtagccgattaataccgtcagcacgcaccagacgtacgggttggacggataggcccacagcaggacggaaacggtaatcgcggtaaggatcatgatcccgcccatggttggggtaccgcgtttgctgaagtgggactccgggccgtcgttacgaacgacctgaccaaaggacagtttttgcagacgggcgatcatgcgcgggcccatccacagagagatgaacagcgcggtcagcaggctgacgatggcgcgaaacgtcagataggaaaagacgttaaagccggaataatatttgaccagatgttcggccagccatactaacatgtcgcaatctcctgtaatgcgcgtactacctcttccatagcggcactacgtgaacccttcactaaaatggtcatgattttatgctctgccagcagctcgcgcaggcgagctaccacggcggctttatcgttaaaatgttcgcccacgccgctggcgctgctgatatccgcgctcagggaaccgacgctgaggacgcaatccagccccgccgctttcgccgcttcgccaacttcgcgatgacaggccgcgctttcagcgccgagctccgccatatcgccgaccaccatcgcccggaagcccggcatttccaccagcacctgtaccgcggcggtcatcgaaccgacgttggcgttgtaggagtcatccagcaacagctgattttccgccaactgaatcgggaacagacgtcccggcaccgcttgcagctgcgccagcccggttttcaccgcggccagatcggcgccgaccgccatcgccagcgatgttgccgccagcgcgttagcgatgttatggcgccccggcagcggcagcagtacgtcgacgttgccggacggggtctgcagcgtaaattcggtgccatgactggtgatatgcacgttggtcgccgtgaagtcgctgttcgccgcattcggcgagaagcgccacactttgcgatcgccaatcacgctctgccagttcagccagtcgttattgtcggcattcaaaatcgcgatgccgttttgcggcagaccggtaaagatttcgcccttcgccttagccacgcccgccagcgagccgaagccctcgaggtgcgcggcggcgaggttgttgaccagcgccgcttccggacgcgtcaggctgacggtccaggcgatttcgccctgatggttggcgccgagttcaatcaccgcatactggtgatctttattcagacgcagcaacgtcatcggaaccccgatatcgttgttcagattaccggcggtatacagcgtgttgccgcactggctgaggatcgccgcggtcatctctttcaccgaggtcttaccggacgaaccggtgagcgcaacgacgcgggtcggcacctgctgacgcacccaggccgctaactcgccgaaagccagacgggtatctttcaccaccacctgcggtaaatcgcaggccagcgggcggctaaccagcagcgcgcctgcgcccgccgctttcgcttgttcggcaaaatcatgcgcgtcgaatcgctcgcccttcagcgccacaaacaggcaacctgccgtgactttgcgggtatcggacgtcacgtcatcgatagcgatatcgctaccttgcagttcgccgcgggtgatctcggcgagctggcttaatgtaaagcgaatcatgctaccgctcccagcagacgcgcaacggtaacgcggtcggaataatccagacggcggttaccgacgatctgatagtcttcgtggcctttgcccgctaccagcacaacgtcgttcgctttcgcctgcatcaccgcgccggtcaccgcttccgcgcggccttccatcaccttcacctgcccggcatcaagcatgccagccagaatgtcattgataatcgcccgcggttcttcggtacgtgggttatcgtcagtcacgaccacgatatcggcaaactcttccgcgatagcgcccatcagcgggcgtttacctttgtcgcggtcgccgccgcagccgaagacgcaccacagcttgccgctgcagtgcagacgcgcggcctgcagcgctttttccagcgcgtcaggcgtatgggcgtaatcaaccaccacggtcggtttgcccggcgcgctgaacacttccatacggccacacaccggctgtaaacgcgaagaggttttcagcagatccgccagcggatagcccagcgccagcagcgtcgccagcgccagcagcaggttgctgacgttaaaggcgcccatcaggcggctttcgatttcgcccttgccccagctcgagtcaaactgaatggtcgcgccgctgtcgtgatagttgaccgcggtcgccttcagccagcggccgtggcagttcggattgatatgatcttccatcgacaccgccaccgcatccggcagtttcgccagccagcgacgcccgacttcatcgtcagcgttaacaatggcctggccgcaatggtgggtggaatagagcagccatttcgccgcttcgtaatgttccatgtcgccatggtagtcgaggtggtcacggctcaggttggtaaacaccgaggcggcaaactgcagcgccgccacgcgatgctgaaccagcccgtgagaagagacttccatcgcgccgaaagtcgccccctgccctaccaggccggaaagcacgtgctgaacatcgaccgcagagccggtggtgttttcggtcggcaccactttatccagcaggccgttaccgacggtccccatcaccgcgctggtttcgccgagcagctttgcccactgcgccaacagctgcgtagtcgtggttttaccgttagtaccggtgacgcccaccagacgcatctgctgcgaaggttgttggtaaaaacgcccggccagcgcggataaccgctcgttcagttggctcaggtagatgaccggcacgccgtgcatctcgcgaacttcgccgtctgcggcctcgccctgcgcctcagcaataatggcagcaacaccttgcgctatcgcctgcgggatataacgacgcccgtccgcctgatgaccctgtaccgcgacaaagaggtcgccggacgccgccacgcggctgtccagcgtcatctctcgcagaattcgctccggcgcatttggcacccacggagcgagaaggtcgcgcaaattacgatctgccacctgttccctcgccttgattaatcacaaattcacttttttcgcccgttgccagcgcatccggttcgacgttcatggtacgcaatacgccgcccatgatggcaccgaataccggcgcggaaacggcgccaccgtagtatttacctgcctgcgggtcgttgatcaccaccaccagcgcgaaacgcggatggctggcgggcgcaacgcctgcggtgtaagcaatatatttgttgatgtagcggccatccggccccacttttttcgccgtaccggttttaatcgcgatgcgatagcctttgatcgccgctttcacgccgccgccgccgggcagcgccacgctttccatcatatgaacgacggtacgaaccagtgattccgggaacacgcgctcgcccggaaccggtggatcaactttggtaatcgacagcgggcgatagatgccgtagctgccaatcgttgcgtagactcgcgctaactgtaacggagttaccattagcccgtagccgaaagaaaaggtggccctctctatgtcagaccaccgttgtttttgaggatataagccactgcgttctccgaccaaccccaaattggtcgcctttccaagcccaaaacgtgagtaagtatctactaacgctgaggacggcatcgctaacgccagcttagaaacgccgacgttactcgacttctgtagcaccccggtcagggttaattcgctatagcgcgccacgtctttgatttcgtggccgttaattcgatatggaatggtgttcagcacggtattttcattgacgatgccgcgctgcagcgccgtcatcaccaccatcggtttgaccgttgaacccggttcgaatacgtcggtgatggcgcggttacgcatggtatctttggacgtacccgcgaaattattcgggttgtacgacgggctattcgccatcgccagcacttcaccggtgttgacgtcgaccaaaacggcggtgcctgattccgctttgttgaacgccaccgcattattcagttcgcgataaaccagcgcctgcaggcgctcgtcgatgctcaacgcgaggttatgcgccgcctggctgtcggtggaagaaatgtcttcaatcacgcgaccatagcggtctttacgcacgatacgctcgcccggctggccggtcagccacttatcaaagcttttctcaaccccttcaatcccctggctatcgacgttggtgaagccaatgaggtgagcggttacttcgcctgacggatagtaacggcgagactcctcacgcagatgaatccccggcagcttcagttttttgatgtagtcagccatgtcagggttcacctgacgcgccagatagataaaacgcatccgcgggttgctgttgatgcgcgatgccagctggtccagcggcatgttcagcgcatcggctaacgctttccagcggttatcgagcgtcacgcctccggcatcatgcagctctttcgggtcggcccagatggcttttaccggcacgctgaccgccagcgggcggccggagcggtcggtaatcatgccgcgcgcggttgacacttcctgcacacgcagggaacgcatatctccctgacgcaccagcatatccgggctcaccacctgcagccacgcgacgcggccaagcaggaaggcgagagcgattaaaatacatccgcacagcaacgcaaaacgccaactaataaagttggcctgttcttcctgacgttttgcttttggcgttttcggcgctgctttcatgcgtcgcaataatccttatttctgtaccactatattttcttgtgatggatcaacgtgttgcatctgcaacttctctgtcgcgatccgctcaacccgactgtgatcgccaagggcgttctcttcgaggatcaggttgcgccattcaatatccagagcgtcacgctccagaaccaactgttcacgctgcgcggttaacagacgggtatggtgcgccgtcgtcaccacggtcactgccgttatgatgatgcaaatgaacaggcagagtggcagcttcccaaaccgcagaagatcgtccccgatgacgccaggcaaggcatggcgctcgttgcttcctaacgatcctttaactttgcttaaggctactgtcactctgccgatcatgcgttcgtcctctctgcgatacgcagcactgaactacgggcgcgtggattctctgccacctcttcttcgcccggcatcaacttgcctagtgctcgcaactgacggccgcccagtttcctgagctgctcttcagtcatcgggatccctgctggaacctgcggaccgcggctttgctcacgcataaagcgcttcacaatgcggtcttccagcgaatggaaactgataatcgacagccgaccaccgggggccagcacgccgagcgagctttttagcgcctgctctatctcctccagttcactgttcacccagatgcgcaccgcctggaaggtacgggtcgcgggatgtttgtgcttatctttcaccggcgttgccgccgcgataacttccgccagctctttggtacgggtcatcggctcaatgcggttacgctcaacgatcgcgcgcgcgatacgtttaccgaaacgctcctcgccaaaggttttgattacccaggcgatgtcggcttcttcggcggtctgtaaccattcggcggcggactgaccgcgagtcggatccatgcgcatgtccagcggaccatcgcgcataaaggagaatccgcgttccgcgtcgtccagctgcggtgaagaaacgccaagatcgagaagaataccgtcgatcttgccggtaagattgcgctcggcgacgtagtcagccagctgcgagaaaggaccatgtacgatggaaaagcgtgggtcatcgatggtttgcgcaacggcaatagccgtcgggtcgcgatcgattgccagcaggcgcccttccgcccccagttgggagaggatcagacgcgagtgaccaccgcggccaaaggttccatcaatgtagataccatttggacgaatattcaggccgttaacggcttcatccagaagtaccgtagtatgtttaaaattttccatcattttataaagacaaatcctgcaggcgctccgacagttcaccggtagcggactgctcagcgtcgatatcttccttgacccgttgataccaggtcgtttcatcccacagttcaaatttattaaactgtccgaccagcatcacttcttttgtcagcccggcatgttgccgcagcaccggcgcgattagcaatcgtccggcgctatccatctgacattcgctggcatgccccaaaagcaggcgctgtacgcgccgctcaacgggattcatgctcgacaaacgcgacaatttttgctcgatgatttcccattcaggcaaaggataaagcagcaggcacgggtgatgaatgtcaatggtgcataccatttgaccagaagcatcctcgatcagcccgtcgcggtagcgcgtcggtacggccaaacggcctttactgtcgagattgactaacgttgctccacggaacatgccagcctcaccccttttcgccactttaccccacaaattcccacctaaaggagtttacggagcggaggaaaagcttgtcaagccagcactaatgccaacggagcgcaaaaacccattatttacagccgatattagccctgatgaataaatcaccaacaaacgaggcaaattaacgttatgaatacgtgtaagaaaataaccaacaaacccgtaacagttaaaaacgacaaaatatcttcaacgggaaaatataaagtgtcagtttgcgacgcgagcggcattttaggtcattctggtgtccgttaacagtgcctgttgtggacggagaagcacttgtgccgcggcctgacgctctcagcggcggggaaggtgggataaagcgattgttaattcagcaattattacgaagaatgtaacaaaacaattcaaattaatgccgctgcgctttttcttgcaccatttggatacaaaaaaagcctgctccagaataaaacaaaataaggcgtaaagaagtttagggatttgtctgaaagcgaatagatttacgaatctctacgtaaattgtatggaatatcgccagatgctgatccatctggcgaataacctacgaagaatcttaaccttttttcgcaaatgaatcagcgacgattcaaacttccgcgatgatagaggttacgacgtatacgacttaagcccggtttcggcttacgtggttcatccaggcttgccagtacaatctctaaaacgcgctcggcaacgtcgcgatgacgctgcgcgaccgccagcaccgggcactgcaggaagtcgagcagttcgttatcaccgaaggtggcgatggccagctcagatggcagtttgccctcacggcgcagcgtgacatccatcaccccctgcagcagcgggaaagaggtggtgaacagcagttgcggcatcggatgcgtttccagccacttttcaaacagctgggccgcggcttcgcgttcatagctgttggcatagaggaagttcacctcgcgcgggtcgtctttccaggctgaacggaacccctgctcgcgcaggaagctcaccgacagctccggcagcgctcccagatagagcactcggtcaccggggaatttgcgcagctcggcggcaagcatctcagcgtcgtcctgatcggcgccgacgacgctggtaaagtgttcacgatcgagcgcgcggtcgagcgcgacaatcgggaaaggatcgttcgcccagcgctgatagaacgggtgctccggcggcagcgaagtcgaaacgataattgcatccacctgacgctgcagcagatgctcaatacagcgcatttcgttatccggctgatcttccgagcaggcgatcagcagctggtagccgcgctgacgcgcctggcgctccagatagttcgcaatacgggtataactggtattttcgagatccgggatcaccagaccgattgaacgcgtgcgtcctgcgcgcaggccagcagcgaccgcattcgggtggtagttgtgctcgcgcaccaccgccatcaccttctcgaccgttttatcgctgacgcgatactgcttcgctttgccattaatcacatagctcgcggtggttcttgaaacaccggccagccgggcgatttcatccagtttcacaattgccccttgggtaagaagtacaaaaaacaaccattaaatagacatactcattagagtatagagttccatttttataacatctaaacgcagaatagatagcgcggcaaccgctttcgtccacagttcctacggaattcgcaaaaaaataacccgacagttcgtgtcgggctgtttttacgtcagtttgtcaggggttagcgcatgattttatcgccgcgcgacaggccgactactccggatcgcgccacttcaacaatgcgcgcgacatcgcgtaaagaagccaggaacgcatccagcttatcgctggttccggccaactgcacggtataaatagatggcgtgacgtcaatgatctgcccgcggaagatctcggtgttgcgtttcacctcttcgcggccataaccgctggcctgcactttcaccagcatgatttcacgttcgacgtgggagccctgacccagttcgctgacccgcagcacgtccaccagcttatgtaattgcttttcaatctgctcaatggctttttcgtcgcccaccgtctggatggtcatgcgggacaacgtcggatcgtcggttggcgctaccgtcaggctttcaatattgtagccgcgctgcgaaaagaggccgatcacccgggataacgctcccgattcgttctccagtaatacagataatatccggcgcataatcaggttctctccgttttgctcaaccacatttcgtccatgccgccgccgcggatctgcatgggataaacatgctcgctaccatcaaccgtaacatcaacgaacaccagacgattattacgcacctgctccagggcttccgccagcttcgcttccagctcctgcggctcgctgatacgaataccaacgtggccataagcctcggcgacgcgaacgaagtccggcagcgattccatataggactgcgaatggcggccagaatagagcatatcctgccactgctttaccatcccgaggtagcggttattcaggttcagcaccaacaccggcagttcatactgcagggcggtggaaagctcctgaatgttcatctggatgctgccatcaccggtcacgcagatcacggtttcttgcggtagcgccatcttcacgcccagcgccgcaggcaggccaaagcccatcgtgccgaggccgccagagttaatccaacgccgtggtttatcgaatggataatagagcgcggcgaacatctgatgctgtccaacatcggaagtcacgtaagcatcaccattggtcaggcgccagatagcctcaatcaccgcctgcggtttgatcttgccgctttgcgtgtcgtattgcagacagtgacgggaacgccactgttcgatctgctgccaccagtcgcggatctcatccagcggttgctggctctcttcctgttcaagcagatcaaacatctggtcaagcacctggcgcgcgtcgccgacgatcggcacatctgccgggacggttttggagatcgacgtgggatcgatatcaatatgcagcaccgtggcgttcgggcagtacttagccaaattgttggtggtacgatcgtcaaagcggacgccgactgcaaaaataacgtcggaatgatgcatggtcatgttggcttcataggtaccgtgcatccccagcatgccaagcgcctgctgatgagtcgccggaaaagcgcctaaacccattaatgaagagaccaccggtagcttcagcttttcgaccaaggtacgcagctgtgcttcacactgcgaattgattgccccgccgccaacgtatacgaccggttttttcgccgccaccagcgtttgcaacgcacgtttgatctgccctttatgaccgctggttgtcgggttataggaacgcatgctgaccgcatccggccaaacataaggcagctttttcgccggattgagaatatccttcggcaaatcgaccactaccggccccggtcggccgctggccgccagccagaaggctttctttaaaataccgggaatatcttcagtctgtttcacgaggaagctgtgtttaaccaccgggcgcgagataccgaccatatcgcactcctggaaggcatcgtagccaatcagcgaggtggcgacctgcccggaaagaatgaccagtggaatggaatccatgtaagccgttgcgataccggtaatagcgttagtcgctcccggaccggaggtcaccagcaccaccccgacttcgccggttgcgcgcgccagtccgtcggccatatgcaccgccgcctgctcatggcggaccagcacatggtcaatgccgccgagggtatgtaatgcatcatagatatcgaggaccgcgcctccgggatagccgaatacttgcttgacgccctgatcgacaagcgattggacgaccatctcggctcctgacaacatctccatggtttgcctccaggcttattgttttcacgacggcggaagtcattttccgcacgcgtcgtatgatgcgccgctaaaggcagcgcattgaggtgaacgacttgctgtgcattaacataactgctcgccaacaggcaggcaattcgcctgagagcgtatagcgcgcctcttaaaagcagaaaagaaagcatctggagaaatatatggaggattgcttcaggaataacaaaatgagatagccaatactcgggagaaacggcttacggcagaaaatcatccatttttcaccgtcgggttgcgagaacccgcggtgataaacagaataatattctgcttttttaatgtttactcagataagctggcgctttcgccgccgttggtcgataacgtcgattagcgctgacagatattcgccaataactcttccatccattgatggcctttatcacgaccggccgcttcgtgccaggagaggaagcaggtgcggctgttgaccttcagcggcaacggtaagatctgcaaatctaatttatcagcgaattcattggccaaccaacgtggcgctattgccaccatgtgggtttgcgacaccacgtttaatacgctaaccatggcattaccctgataagcaatacaggattgtttatccacggagtcataccacggctggctaaatgaagcataacgatccaatgcgacgaccgcgtgctcttcctgataaatatccgcttccgttagcggcccggaaatacgcggatgtttacggctggccaccagaaccatttcatctttgaataaaggtatgcaggcaaactccgggcgacggaactcttcataaccgataacgaattcaatttcctgataacgcagctgatgttcggtgttttgatgtagcgctgatttaaagaccagatgaatatttggcgcgatttcaccaactttattaaatattagcgaggttaagtaattatccaatgggctacaaacgcagaggttaaatacgcgctcgctgctcagcggttcaaaaccggaacccggcaactcattttgcaccagttgcaatgcctggcgtactgagccgaacagctgataggcccgcgccgttggctgaatgccgcgcccatagcgaacgaacagctcatcattaaacatcaccttgagacgagataccgcgttactcaccgccggttgggacatgccgagagtgtgggccgcacgggtaatattttgttcctgcatcaccgcatcaaagacggtcagcaggttgagatccaccatccgcagttgtggtttgacgacttcctgtcccggggctgatttatattcagtattttcaattaacatatctaactccaccgtcacgctaaattccttttaccaaagtgcagtaattaattaagacaatatcatttatcatgcatattaaatctgcaaaagggcaaaatggaattttaggaatatatcaaggttatgagtagcgacgaaaaacctcactggatatcaccggaacccgcctaaaacatatcatttacttgatgatataaagtgtacccatagatcacaggaataaacaacaccaccaatagttaattgcaatttaagtattaattaactatctattttttacctgataaaaattaacacttcgttatcctttcgaacgactcaatgcggcagcgcataaaggtaaaaggcatataacactttatgtttcattaccttatcaaccaggcatcccccattgacattgagtctttgaatgaaaattattttttctaattgttttatttttccagcagtcgatgaatgtctcaaataggatcgtcggcgaaatgagggataatccagcacaattagctaattcatatgacgggttaaaaacagtttttatcttgcctggggttgacatcaaaaccgctatccagtaactctaaaagcatatcgatttcaactggagtatgacgcatgattcgcaccactcgcttcaccagcctactactactaaacgcatccattgtgcgcggtaggctgttgggcgacgttcagcgttaagtcatcttccagcaagacactaaacccgcgccattgcgcgggtttttttatgctcgaagcaaggcgccaggcaacagattaaggatctcaaccatgagccagcaagtcattattttcgatacgaccttacgtgatggggaacaagcgttacaggccagcctgagcgtgaaagagaagctgcagatcgccatggccctcgaacgtatgggcgtcgatgtaatggaagtcggtttcccggtttcttccccgggcgattttgaatcggtacagaccatcgctcgcaccatcaaaaatagccgcgtttgcgcgctggcgcgctgcgttgagaaagatatcgacgtggcggcggaatccttaaaagtggcggaagcgttccgcatccacaccttcatcgccacgtctccgatgcatatcgccaccaagctgcgcagcacgctggatgaagtcatcgaacgcgctatttatatggtgaaacgtgcgcgtaactataccgacgacgtggaattctcctgtgaagacgcaggccgtacgccgatcgacgatctggctcgcgtcgttgaagcggctatccgcgccggcgccacgaccattaatatcccggataccgtcggctacaccatgccattcgaatacgccaacatcatcagcggcctgtatgaacgcgtaccaaacattgataaagcaattatttcagtccacacccatgatgatttaggtatcgccgtcggcaacgccctcgccgccgtccatgctggcgctcgtcaggtagaaggcgcgatgaacggtatcggcgaacgcgccggtaactgcgcgctggaagaagtcatcatggcgatcaaggtgcgcaaagacatcatgaacgtgcacaccaatatcaatcaccatgaaatctggcgtaccagccagaccgtcagccaaatctgcaatatgccgatcccggctaacaaagctatcgtcggtaccggcgccttcgcccactcttccggtattcatcaggatggcgtgctgaagaaccgcgaaaactacgaaatcatgaccccggaatccatcggcctgaaccaggtacagctgaacctgacttcacgctccggtcgcgcggcggtgaaacaccgcatggaagagatgggctacaaagagagcgactacaacctggatcatctgtatgacgccttcctgaagctggcggataaaaaaggccaggtcttcgactacgacctggaagcgctggcgttcatcaataaacagcaggaagagccagagcattttcgtctggactacttcagcgtccagtctggctccagcgatattgctaccgcctctatcaagctggcctgcggtgatgacatcaaaaccgaagccgccaacggcaacggcccggttgacgctatctaccaggcaatcaaccgtgtgacagactacaacatcgacttagtgaagtatggcttaagcgccaaaggccacggcaaagatgcgctgggtcaggtggatattgtcgtggaatacaacggtcgccgcttccacggcgtcggcctggcgaccgatatcgtcgaatcttcagcaaaagcgatggtacatgtgcttaacaacatctggcgcgccgccgaagtcgaaaaagaattgcaacgccaggctcagaataaagagaacaacaaggaaaccgtgtaatgtcgaagaattatcatattgccgttttgccgggtgatggaattggcccggaagtgatgaaccaggcgatgaaagtactggaagccgttcgtaaccgtttttcaatgcgtatcaccaccagccagtacgacgtgggcggcatcgccatcgaccgtcagggcatgccgctgccgcaagccaccgttgatggctgcgagcaggctgacgcgattctgttcggatccgtcggcggcccgaagtgggaacatctgccgccggccgaacagccggagcgcggcgcgctgctgccgctgcgtaaacacttcaaattattcagcaatctgcgcccggctaaactgtatcaggggctggaagcattctgcccgctgcgcgccgatatcgccgccaatggcttcgacattctgtgcgtgcgcgaactgaccggcggcatctacttcggtcagccgaaaggtcgtgaaggcagcggccagcacgaaaaagccttcgataccgaggtataccatcgttttgaaattgagcgcatcgcgcgtatcgcctttgaatcggcgcgcaaacgtcgccataaagtgacgtcaatcgataaagccaacgtcctgcagtcttctatcctgtggcgcgaaatcgtcaacgagattggcaaagagtatccggacgtcgaactggcgcatatgtatatcgataatgccaccatgcagcttattaaagatccgtcgcagttcgacgtactgctgtgctccaacctgtttggcgacatcctgtccgacgagtgcgcgatgatcaccggctctatgggcatgttgccgtccgccagcctcaacgagcaaggttttggcctgtatgaaccggcaggcggctcggcgccggacatcgcgggcaaaaatatcgccaacccgattgcgcaaatcctgtcgctggcgctgctgctgcgctacagcctggatgcgggcgacgcggcgagcgccattgaacgcgctatcaaccgcgcgttagaagaaggcattcgtaccggcgacttagcgcgcggtacggcagcggtcagtacagatgaaatgggcgatatcattgcccgctatgtcgcggaaggggtgtaatcatggcgaaaacgttatacgaaaaattgtttgatgcgcacgtggtgtacgaagcgcagaacgaaaccccgctgctgtatatcgaccgccatctggtgcacgaagtcacctctccgcaggcgtttgacgggctgcgcgcccatggccgccaggtgcgtcagccgggtaaaacattcgccactatggatcacaacgtctcgacgcagaccaaagatatcaacgcctccggcgaaatggcccgcatccagatgcaggaactgattaagaactgcaaagaatttggcgttgagctgtatgacttaaatcacccgttccagggcatcgtacacgtgatgggcccggaacagggcgtcaccctgccggggatgaccatcgtgtgcggcgattcccataccgcgacccatggcgcattcggcgcgctggcattcggtatcggcacctctgaagttgaacatgtgctggcgactcagaccctgaaacaggggcgcgcgaagaccatgaaaatcgaagtccgtggcaaagcggcgccgggcattaccgcgaaagatattgtgctggcaatcattggtaaaaccggtagcgccggcggtaccggccatgtcgtcgaattctgcggcgaagccattcgcgatctgagtatggaaggccgcatgactctgtgcaatatggcaatcgaaatgggcgccaaagcgggtctggtcgcgcctgacgagacgacattcaattacgtgcagggccgcctgcacgcgccgaagggccaggatttcgccgacgcggtggaatactggaaaacgctgaaaaccgatgatgacgccaccttcgataccgtggtgacgctgcaggcggaagagattgcgccgcaggtcacctggggcaccaatccaggccaggtcatctcggttaccgatattatcccggatccggcgtcgttcagcgatccggtcgagcgcgccagtgccgaaaaagcgctggcctatatgggcctgaaatccggcgtgccgttgaccgaggtcgcgatcgataaagtctttatcggttcctgtactaactcgcgaatcgaagatttacgtgcggcggcggaaattgccaaagggcgtaaagtggcgccgggcgtacaggcgctggtcgttcccggctccggaccggtgaaagcgcaggcggaagccgaaggtctggataagattttcatcgacgccggttttgagtggcgtttaccgggctgctccatgtgtctggcgatgaacaacgaccgcctgaatcccggcgaacgttgcgcctctaccagcaaccgtaactttgaaggccgtcagggccgcggcggacgcacccatttagtcagcccggcgatggccgcggcggcagcggtaaccggccatttcgccgatatccgtaacttgaaataaggagaccatcatggcagagaaatttacccaacatactggcctggtggttccgctggatgccgcaaacgtcgataccgatgcgatcattcctaagcagttcctgcagaaagtgacacgtaccggctttggcgcgcacctgtttaacgactggcgtttcctcgacgaccaggggcagcaaccgaacccggagttcgtgctgaacttcccgcaatataagggagcgtctattctgctggcgcgtgaaaacttcggctgcggctcctcgcgcgagcacgcgccgtgggcgttaaccgattacggtttcaaagtggtgattgcgccaagctttgccgatatcttttacggcaacagctttaataaccagctgctgccggtgacgctcagcgatgagcaggtggacgagctgtttaagctggtacaggctaacccgggcatcagctttgaagtagaccttgaagagcaggtggttaaagccggggataaaacctacagctttaaaatcgacgacttccgccgccactgcatgctcaacggcctggatagcatcggcctgacgctgcagcatgaagaggcgatttccgcctacgaacgccaacagcccgcctttatgaactaatcttcaagcccggtgaacaagccgggctttctctttttgcccctctcaggcgcatattaatacctataattaatagataattttatccttcccatccctcatcgtgcatttataccggcattagcaggctatttttgtatatatccacaatgacaagtaaataatcaacggaagtatttaaaacaaaccgagcaatatgtgaattaacggttaactccatagaaaacccctatagctcagcgcaaaaaaaagcattatttttcccctccccggctcgttatctttccagacagagaaatattaactttagatacgccacgccgcctacatcacctcgtgggtcgccgggcgttcttgtggagagcctaaatgagccactatcctcacctattcagcccgctgaccatcaacgggatgaccataaaaaaccgtattattatgccgccgatgggcaccaatatggctaccctcaacggcgaggtctcgcaggaacagcttgaatactacgagctgcgggcgaaaggcggcaccgggctcattaccgtggaaaatatctgcatcgattttcccttcgcctccaatggtacaacgcagttacgcatcgataacgatcaatatatcccacgcctgtttaaattaaccgaaacccttcataaacacggcgcttgcgtagcgattcagctgaaccacgcgggcgcttcggcttatgcttatcgcctgaatggacagacgccgttatccgcttccagcacgccgtcgaaaaagcacggtaatattccgcggccaatgacccatgaggaaatttatcacgcggtggacaaattcggcgacgccgcggagcgcgtgcgccgcgccggatttgactgtgtagaaattcatggcggccattcctatttaattagccagtttttgtcaccgttatttaataaacgtaccgacgaatttggcggcagtatcgaaaaccgcacccgcatattaagcctgattatcgataaggttcgcgcctgcgtcgggccgcgtttcccaatcagcctgcgcatcagcgccgacgatttcttaaagggcggcaacacgctggaagattcgctgcgcatcctcgaactgtgccaggacaaagtcgacatcattaacgtctctgccgcgcagaacgataacctgaacctgcaaatcgaccagatgtcgctggaagacggctggaagcgctacctctcccgcgcggtacgcgacaaattccataagccgacggtgatcgccggcaacattcgttcgccaaaaatcgccgaagatatcctcgctaccggcgatgccgatctgatcgccattggtcgtgggttgattgccgagccagaatgggtgcagaaagtacaaagcggcaatgagcgtctgatgcgcaaatgcatctcctgcaatatcggctgtgcggatcaccgtatcgcccgctctcgcccgctgcgctgctcgatcaatccggacattatccacggcgacgcttacaagcagcagcgagtctcacgagaaaccaacgtcgtggtgatcggcgccggcacggccggaatggaagccgcctgtaccgccgcggaagtcggctgcaacacctggctgctggaagagaaaagccacgtcggcggcctggccagcaccattgcgctgctgccggagaaaaaacggatcgctgatttcccgcagtttatgaaaaaccgcctttccgggctaagcaatctgatgctgcagatcggtaaacgcgccgatgtcgcttcagtcgccgcgctgcatccacagctcatcgtcaatgccaccggatcggttcctctgctgccgcctatcgacggcctgcgcgagaacattgacgccgaaggtggtcgcctgttctcgataaccggaatgataaaccatctggacacctttgccgatgccgcaggtaaacgcatcgtggtggttggcggcggcgccgtcggcctggacgtcattgaatacttctccgcgcgcggcgccgagacggtgctaattgaaatgcaagacgcgccgggacaggacctcgacattattaccaaaaacgcgatgttgaccatgctggaagaacaccaggtggaacaacacatgcggacccgattaaccgccgtagcgccagaccatttcaccgtgagtaccgcctgcggcacgttcgatattcccttcgactacggctttgtctgcctgggaatgcgcgccaaccgtgctggtctcgacgacatcgcccagtgggccgccgccaacaacgtaaaaatcatgaatatcggcgacagcctgtcggcccggcgaattatcgacggcgtgcgcgaaggccgcaacgtgctagagatactcgaagacatgggcgtactcggcaatcgcgaagcgcaacagattccatttttaacatattgaggatatttatcatggcagaacgtcttaccggtcataccgaactgattggcttaatcgctaccccgattcgtcatagcatgtcgccgaccatgcacaacgaagcctttgcccatcttggcctggattacgcctacctggcgttcgaagtcgataaccaggagctaaaagatgtcgtgcagggtttccgcgcgctgaagctgcgcggttacaacgtctcaatgccgaataaaaccgaaatttgccagtatctcgataagctctcgccggcggcgcagctggtcggcgcggtcaataccgtggtcaacgataatggcgtgttaaccggccacattaccgacggcaccggctatatgcgcgcgctgtcggaggctggtatcgatatcatcggcaaaaagatgaccatcctcggcgcaggcggcgcggctaccgccatcagcgtacaggccgcgctcgacggcgtgaaggccatctcgatcttcaaccgcaaagacaagttcttcgccaatgccgagcagaccgtcgccaagatccgcgataacaccgactgcgagatccaccttttcgatctcgacgatcatgccaagctgcgcgccgaaatcgacagcagcgtgatcctcaccaacgccaccggcgtcggtatgaagcctttcgaaggccaaatgctgctgccaaacgacagcttcctgcgcccggacctgattgtttccgacgtcgtctataacccgcgtaaaacctatctgctggaagtggcggagaaaaaaggctgccggaccctcaacggcctgggaatgatgctgtggcaaggcgcgcgcgcgttcgaaatctggacgggcaaagagatgccggttgaatacgtcaagagcattctgttctaagaggccagagatgaaaaataaatacatccctactgcggcagggctgtatctcaactacctgatccacggcatgggggtgctgttaatcacccttaacatggcccatcttcaggaacagtggggaacagacgctgccggcgtatcgatcgttatctcctcattaggtatcggtaagctggcgacgatcgtgaccggctttttgtcggatcgctttggtcgtaagccttttatctatctagggatcctgagttatctgatcttcttcgtcggcattctgctgaccaaaaatatctatctggcctacgtgttcggcatcatggctggtctggcgaacagcttcctcgactccggaacctatccggcgctgatggagtctttcccgcactccgccagccgcgctaacgtgctcatcaaagccttcgtttccgcagggcagttcctgctgccgttcattatcagcctgctgatatgggcaaatctgtggtttggctggtcgtttgtgattgcggcggctctgtttatcttgagcgcaatctatctgctcaagatgccgttccccgatagccaggcggccaaaaaagaagagatcccagcggcgcaggcagcggcttccgctaaaccgcaagccaacaaactggacatggtaatctttaccctgtacggctatatcggcatggcgaccttttacctggtgagccagtggctggcgcaatatggccagttcgtggtcggtatgccttatgcctcggcgatcaagctgctgagtatctataccgtcggttcactggtctgcgtcttcgtgaccgccgccttcgtcaaagaggtgttcagttccgcggtagccatgatcatctacacctgtctgtcgatggtctcactgctgttagtgtgcttattcccgacaccggtgatggttaccggttttgctttcgtcatcggctttgccgccgcgggcggggtactgcagctgggggcgaccatcatggcaatgagctttccgaacggcaaaggcaaggcaacagggatcttctacaccgcaggcagcatcgcgagcttcacgatcccgcttatcaccgcaaagctttcgcagattagcattgccagcattatgtggtttgatttcctgatcgccgtcatcggctttgtgatcgccctgtacatcggctatcgtcaacttcaggctcgcgcggcgcaaagagtgtctcgcaccaccgtcaccgcctgaggttcaacgacaacaataatggatacctacatgacaactgcagtaaccgtaaagaacatcaccttcaaggaaggcgaaaccttaatttgcgtaccgctgatcggaaaaacgctggatgaactgctgactaatgctcagggcctggttgacgcgggcgctgatattatcgaatggcgcgttgaccattttactcacgtccgggaaatcccccaggtgctggccgcactggcggaaatccgtcataccctgaaagcactcccgctgctgttcaccttccgcagtaagaaagaaggcggcgaaacggaaatcagcgacgaagcgtattttgaacttaaccgccaggcggccctaagcggattagtcgatgttatcgacatcgagttgtttaacgatgaagcgcaaattcgcgcgctggtgaacgacgcccatcaggccggcgtaaaagtgatcatgagcaatcatgatttccataaaacaccggcgcaggaagatatcatctatcgactgcgtcgaatgcaggatctgggtgccgatctgccgaagatcgcggtgatgccactgacgcctcaggacgttctcactctgctttccgccacgctgaccatgaaagagaagtatgcgacgcgcccgctgatcaccatgtcgatgggcaaatccggcggcgttagccgggtaaccggtcgcttgttcggttcagcgatgacctttggcaccgtcggccaggcctccgcgccgggccaaagggccatcgctaagctgcgcgaactaatggacattttgtcctgataaacatgctgcccggagccagtctccgggcgcttgctcagttgattctctggctatcgttaatgatgacgtttttaaacgattgaatcgctgaggaaagtaccctttccttcattgttgcgaggtaaatataacgaggtgggatcgcatttttaatcttcagaatgcgcacgttataatttgccagtgcggagatcctcggcataatcgcaatgccatagtcgatgctaaccagccccgccatcgcagtatcttcatcgacgtagcaggcgatatccggtaccagtttttgttgcataaagacattatcaataaatggccgcagaccgctattctctgaaaaatagatatagggatagtgaatcgtctcaaccaaatcgacctcattatcatacagccgggcaagcagatgatctttcgcggtcaccaccaccaactcctgctgaataataggaataaagtcgatttcgggttcatcggcaatatatgaacaaatcgccagatcggtttttcctgcctttaacgcttgtaataacgaaagcgaagtgccttgcgtaaaggaaaaagtcaccttgtgactggaaggtgaattagtgtatttattaattaactgcggaacaacagattcacccatcgtataaataaaggcgatacgaatattctctttcttttcactatcattgttttgcagcgtcagacgcccgttctccagagaagcgagcgcatcctccacatagggtaaaaaacgtttaccgttttgcgtaattttgacgttgcgtccttttctggcgaacagcgccacgccaagttccttctccagctcagatatggcgtggcttagcgagggttgagtaatgaacagactggatgctgcctcggtgtaatgctccgtctcgctcaatcgcttaaaataataaagttgcttcaggttcattatttttgtccgtataatataagaataagaccactgcgtttaatataccatgcggcaggttgataatacgctacaacgagtcaatatcagattcacatcaaatattatttgatatttccttttgtgcgtaacaaagcgttgccattcatagacccagtctatgaattcttagagtatttctgcatgcataaatacatgcaaaaatattttaaactttaaaggaaatctttatgtgcatacctgacgctcaagggagcctggcatcatcgcccggcacgctaaaaagaagcagaacgcgtatttttattttatcgctgttatcgctgggtacgatgattaattatctcgatcgtaccattcttggaatcgttgctccaaaattaaccactgaaatccatattgatccggcgatgatgggcattgttttttccgcttttgcctggacttatgcgctggcgcaaattcctggcggcatgtttttagaccgattcggtaataaattgacctacgccctctccatcttcttttggtctctgtttacgctgctgcaaagcttctctctggggctgaaatctttgctccttttgcgtctgggcctgggcgtcagtgaagccccctgctttccggccaatagccgcatcgtcagcaaatggtttccccagcatgaacgggccagggctaccgcaacttatacggttggtgaatacattgggttagccgccttctcgccattgttatttttaatcctcgaacaccacggctggcgcaccttattttttctgaccggcgggctgggaattttattcactttcgtatggtggcgtttttatcatgagccacatgaatcgaaaacagcaaataaagcagaactggattatattggcgccaaccagattgccaataagagtgaaaacattccatttaactggcgtgatgccaggcggctactgtgctgccgacaaattatcggcgccagcctggggcagtttgccggtaacaccacgctggtctttttcctcacctggtttccaacctatctggccaacgaacgccatctaccgtggcttcatgtaggttttttcgccacctggcccttcctggccgccgcggttggcatcatcttcggcggctggctttccgacaggctacttaagcgtaccggctcggcaaatataagccgaaaacttccaataatttctggattactcctttctagctgcattatcgccgccaattgggtcagcgcgaattcgacggtgattattattatgtcgatcgctttctttggtcagggaatggtcggtctgggctggacgttaatatctgatattgccccggataatatggctggattgaccggcggtatatttaacttctgcgccaacctggcatcaattattgcgccactcatcattggcgtgattatatcagccaccggtaacttcttttacgctctcatttacgttggcgtgaccgccctgatcggggtgattgcctacatctttattatcggcgacatcaagcgaatcgtactgaagtaacgctatcccgcgccgggccagcatggccggcgcgggagattgacttaaatatctttaacccggctggtcaaaaacagcgtcagcagagaaatcgccgcgattgtccagtacacgctaccgtgaccatagctttgcgacagcgctccctgaatcactccggccagaataaccccggtggagatactattggtaaacagcgtggtcgccgccccggcgcgccccggcatcagatcctggaaccacaacatgccgatcccggcgataataccgatgaaaatagcattgaatagctgcagcgccagtagcgccgtgcggccatggaacataatcagccccacatagaacagcacgccggcggcaactgccgccaccatcattttgcgtttaccccaacgcttaacgtagtagccggccaggatcatcgccggaatttcaagaccggcggccgtgcccatcagtatccccgccaggctatccggcaggccaagatcgctactgatccacaacggcatatcgatgatatacatcgtgttgcaggtccacatcagcgtagaagcgataaacagcatgcgcacgtttttatcgcgccagccgccttccacctccggcaggctgctgccttcctgcagttgcgtcactcgcgccaccgaaggcagcttaaaggcaatcagcgccaggctgatgacaaaaatcccggcggcaatggagaacatggtcgtaaagccataattcaacgccagcataaaagccagcggtggaccaatgacccacgccagcgacagctgggcgcgcatcaccgagctgaacatcaccacttcgcgggcagagctatcggcgtattcgcgggcgagggcaaacagctgcggcattgccgcattagcgaccgaagccagcatgacaccgcaggtaataagcgtcagataatggcggttgaaagcgaacagcagcgcgttacccactgccatcaggcagcagaacataattaaccgccgacgatcgccgcggctatcggatcgtttggccagcgccaggctcaccaggataccggcaatcgcattcaccgtataaaacaggccaacccagaacggctgcgcgccgacttcacggctgagaaacaggctaagcgtcggcgcctgcagcgccccggccacccccatcataaaagccaccagcataaaggcggcgtagacgccgtttagccgtcgccccatcgtcatcaaccacagcatgaaatatccttaacacacgcgaagtaaacgaaaaaagccagcagaagcaatctgctggcgggtgattcaatactctggatttcgagttgcagccaatgcgcttgcagcctgaagatggcgagtataacaccaatactcagtcacacatgatgtcggcaagtcaacgatcggaggtcggcgacgtaactccccactgcatcaattcctccagcattttctgctgcctacctgctaactggcgggccagccaggacgctccctgcgtcgcagaaaagtaccgttgatagaactgcttagtggttgacctcgtcatattcatctccttacttcatcgaggtccattattggcttaatataggaactgataaattgctgagttttcgtcaggagttcctcttttatgccttccagtcgtctgcaacaacagttcatccgcctgtggcaatgctgcgacggcaggtcgcagcagaccaccctcaacgaactggcggaaatgctcagctgttcgcgccgccatatgcgcaccttgcttaatctgatggaagcgcgcggctggcttgcctgggaatccgaagccgggcgcggcaagcgttcacgactgaccttcctttataccggtctggcgctgcagcagcagcgcgccgaggatctactggagcaggatcgcatcgatcagttggtgcaactggttggcgataaaaccgcggtcagacagatgttgatctcccatcttggccgcagcttccgccaggggcgccacatcctgcgcgtgctctactatcggccgatgaagaatctgctgcccggcagcgcgttgcgccgttcggagacccacatcgcacggcaaatttttagcgcgctgacgcgggtaaatgaggaaaatggggaactggaggccgatatcgcccaccactggcagcaaatttcgcctaaccactggcgctttttcctgcgtcccggcattcatttccatcatggacgggagctggaaatggacgacgttatcttctcgctacagcgcagcagcgaactgccgctattttcccatatcgagcgcatcgtctcgccgaccgcctggacgctggatattcacctcagccaaccggatcgttggctgccctggctgttaggccaggtcccggcgatggcgctgccgcaggaatggcggacgatggagaacttttccagtatgcctatcggtaccggcccttacgcggtcgcgcgcaataatcaaaaccagttaaaaatccatgccttcgaagagtacttcggctatcgggcactgatcgatgaggttaacgtctgggtgctgccggaaattagcgaagaacccaacggcggcttaaccctgcagggcaataccgagagcgaaaaagccgtagagagccgcctggaagaggggtgctattacctgctctttgatagtcgaagcccgctgggcggcaatgatgacgtgcgccgctggttaagttatctgttccagcccgccaacctgctgtatcacgccggcgagcactatcaaggcaactggttcccggcctacggcttgctgccgcgctggcaccacgcccgcagtcacgcctgcgaaaaacccgccggcctggagtcagttaccctcacctactatcgcgatcatgtggaacatcgggtcattggcgggatcatgcgggcgctgctggcggaacatcaggtgaggctgaacattcaggaactggagtacgatgactggcatcgcggcgaaacggtgagcgatatctggctcaacagcgtcaacttcacgctgccaatcgatttttccctgttcgcttatttatatgaagtgccgctgatgcatcactgcattcccatcgactgggaggcagacgccaaccgctggcgcgcaggcgagttcaacccggcgacctggagccagcaactgctggagaagcagcatattgtaccgctgatccaccactggctaatgattcagggccagcgcagtatgcgcggcgtgcgcatgaacaccctcggctggttcgactttaaatcggcgtggttcgccccgccggagccctgaatgctttgcgtcatctaacaaaatcattacactatcgccgttctcaacggggtgctaataaacatacgcaatatcattcaagttgcatcaaggcagcaagcgggtgaatcccctggagcatagataactatgtgactggggtgaacgcgcgaagctaacgcagatgcggcttgaaggatgaagcgtatgggctgagaaaatacccgtcgaacctgatccggataacgccggcgaagggatttgaggcctactcaaaatcctttgcctccccatatactgaggtgcaaagtgttgaaaaaactgcttcccctgctggcgctggtcgccgccccggtctttgctaaaccggtcctgaccgtttacacctacgattcattctctgccgactggggccctggcccggcggtgaaaaaggcatttgaggccgattgcggctgcgagctgaaatatgtcgccctcgaagatggcgtatcgctgcttaaccggctgcgaatggaaggcaaaaacagtaaagccgatgtcgtgctcggccttgataacaatctgctggcagcggcggcgcagagcaaactgtttgccaaaagcggcgtgccggccagcgcggttagcgtaccgggcggctgggataacgacacattcgtgccttacgactacggctacttcgccttcgtgtatgacaaaaacaaactgaaaaacccgccgaaaagcctgaaagatctggtcgagagcccgcagaaatggcgcgtgatttacgaagacccgcgcaccagtacgccggggctcggcctgctgctgtggatgcaaaaggtgtatggcgataaggcgccggaagcctggcagaagctggcggccaaaaccgtcaccgtcaccaagggctggagcgaagcctacggcctgttcctgaaaggcgaaagcgacctggtgttgagctacaccacctcgccggcttatcacctcatcgaagagaaaaaagataattatgccgcggcggactttaccgaaggccactatctgcaggttgaagtcgccgcgcgtaccgccgccagcaagcagccggaactggcggagaagttcctgaaatttatggtctcgccaggcttccagaacgccatccccaccggcaactggatgtacccggtgacccaggtggcgctgccggccggcttcaatacgctaaccaaaccgcaaaccacgctgcagttcaccccgcagcaggtcgccgctgaacgtcaaaactggatcggttcatggcaacgcgccgtcagccgctaagtttcggctggctgatccccggcgccgcggcggcctgcttactggtcatcgtagcgctggcggcgtttctggcgctgtggctggaggcgccgcaggcgccctggcagacgatcctcagcgatagctatctctggcacgtcgtacgcttctctttctggcaggcgtttttgtcggcgctattttcggtagtgccggcgatattcctcgcccgcgccctgtatcgccgccgctttccggggcgcacgctgctgctgcgcctgtgcgcgatgacgttgatcctgccggtactggtggcggtgttcggcatcctcagcgtctatggccgccaggggtggctcgccgcgctgttccacgcgctcggctggcagtgggatttctcgccgtatggcttacagggcatcctgctggcccatgtgttctttaatatgccgatggcgacccgcctgctgctgcaggcgctggaaaacatccccggcgaacagcggcaaatcgccgctcagctcggcatgcgcggtttcgtcttcttccgtcttgtggaatggccgtggctgcgtcggcagatcccgccggtggccgcgctgatttttatgctgtgcttcgcaagttttgccaccgtgctgtcactaggcggcgggccgcgggccaccaccattgagctggctatctatcaggcgctgagctttgattacgacccggcacgggcggcgctgttagcgattattcaaatgatctgctgccttgggctggtgctgctgagccagcgcctgagcaaagccgtggcgatcggcgccagtcaggtgcaaggctggcgcgaccccgacgaccgtctgcatagtcgcctgtgtgattacgcgctaatcgcgctcgctctgctgttgctgcttccgccgctactggcggtgatcgtcgatggtctcaacgtcaatctgccgaaggtgctgggccaagccgcgctatggcaggcgctgtggacctcgctgcgtatcgccctcgccgccggtgtgctcagcgttatcctgaccatgatgctgctgtggagcagccgtgaactgcgcgcccgcaacctgccgctggccgggcagacgctggagctcagcggtatgctcatcctcgccatgccggggattgtgctggcgaccggtttcttcctgctgctcaataacagcgtcggcctgccggaatccgccgacgggattgtcatctttaccaacgcgctgatggctatcccctatgccctgaaagtgctggaaaatccaatgcgcgatattgccgcccgctatggcgctttgtgtcagtcgttggggctacaaggttttaaccggctgcgggtggtggaggtgcgggcgctgaaacggccgctggcgcaggccctggctttcgcctgcgtgctgtcaatcggcgacttcggcgtggtggcgctattcggcaatgaatctttccgcacgctgccgttctatctgtatcagcagatcggctcctaccgcagccaggacggcgcggtcaccgccctcctgctcctgttgctgtgctttatcctttttactttgatcgagaaactaccgggacgcgatgctaaaactcaatgatgtcacctggctgtatcagcacttgccgatgcgctttacgctcagcgtcgagcgcggagagcgcatcgccgtgctcggtcccagcggcgccggaaagagcacgctgctgaatctgattgccggttttctgccccccgccagcggtagcctgctgatcgacggcgagaagcataacgccacgccgccggcacagcgtccggtttctatgctgtttcaggagaacaacctgtttaaccatctcaccgtccggcagaatattggcctcggcatccaccccggcctgaagctgaaccgcgagcagcgcgcgcaggtcacggcgatagccgaacaaatgggaatggatacgctgctggatcgcctgcctggcgagctatccggcggccagcggcagcgggcggcgctggcccgctgtctggtacgccaacagccggtgctgctgcttgatgaacccttctcggcgctcgatccggcactgcgccaggagatgctaacgctggtcgccgatgtctgtcagcggcagcagttgacgctgttgatggtatcgcacagcgtggaggatgcggcgcgcattgcgcctcgctccatcgtggtcgccgaagggcgcattgcctgggacggcgccactgacgatctgttaagcggcaacagcagcgcctcggcgctgttgggaattagcgcgaaatgaccttatgcaggatctcaaggtagaccggcatcaggggatggcggaagacaaacgttagcgccgctaccgccagcgtcaccatcaacggcgtcagccacagcaggcgtccacgcggtaaccaacgggtcagacgatcgccggaagttttcgcgctccgccacagccgccagcacagccagcccgccagccacgccagcagcgccgcgcccagtagcagccacttgaagctggcgctgttttcatcggcaggaatatctatcgccgcccccgccagaatgccggggaggaaatagagcggcggccagagcaggcagccaataatattcggcagcacgaacttcgctaccggcaggtcgagcatcccggcgaccatcggcaccaatggccgcgtcggcccgacaaagcggccaatcagaatcgtcaccatgctgtgctggtgcagcgcgtgttcggttttctccagcagcgcgcgattttttttcataaacgaccagcggtgtaacggctttttaaagcgccagccgagccagaatgagatccagtctcccaacaggcagccgacaatccccgccagccacgcctgccagaagttaacttcgccgctgccgataagcgcccccagaccagccatcatgaccgtgccgggtaagataagccccaccagcgctagcgactcaagaaatgccaccagcatcacggctatcaacgagtagaccgtggattgggtgataaagtgttccagcaatgcctgcataatgtacccggttaaaaaacgaagcccggattctccggagccgtcacgtcgtcgtcaagccaccaattgtcttaatagtttactggctgtgacatttaagcgggtcatcatttcactttctttactttttattcacatcctgcgcggaattcactggggctggcgccggtgcattttttaaagactcgcgaaaaatagagctgatcttcgaagccaacgttgcggccgacgctggcaatcggcatccgggtggtactcaacagcagtttggcctggctaattcgctggtcttcccgccagccaagtacgcttatccccaactgctggcgaaacagatgcgacaaacgagaaggcgacaaacagacgtgctgggcgacgctggcgatatcgaaatggctgtccgccagatggtcgctgatgtactgacaggcgtcgcgcacccggttatccagcggcggatgcagcgattcgttaatcgcctccatgcgccgcagtagcaactgttccagcaggttaatcgccagcagttcggaatagcgccccgccccctgcccggcgtcaacgatctgcccgaacagttcgccaaaccgcgcctgccattgctcatccgggcggaagaaaccggtatgggcgaagatcgttggccagttgagccattcatgccagtaggcgcgtgggcggaaatagacccactggtgataccactcgctggcgtcgggatggcggccatagtggtgaatctcccccggcggaaacagcagcatatcaccggggcgacagacgaactgttcgccgtggttgttgatcaccccctcgccgcggatcgtcaggttgagaatatagcctttcatgcccagcgggcggtcgataaagaaatcgagatatccctgcgcctcaatcggcgtcaggccggtgaccagatgggcgttaaaggagtagcccggcagcagcggatcgttttgcgtttcggccataagcgtcgttctccacgagttttttgacaccaattgtccatattcatcattttatcgccatccacgccgtttcgactgcgataccggtgggaatttagacaaaaacccgcacggctagcgaaaaaagcgctaccagcacgcattccgcgttgatccagcgcataacaaaagtgtctataaatacggcaggaaagtccacatcgaatatttgcacggcgtcacactttgcaaggtgacagcaatataatccataagattagcgaatacggcctgacggatttagccggggatatctactgttgctgcatgaatgatttcagcatggagtaacaagatggcaattgcgattggcctcgattttggtagtgactcagtacgcgcgttggcggtggaatgcgctaccggcgtggaactggccgcgagcgtagagtggtatccacgctggcaggaagggctgttctgcgatgggccgaataaccgcttccgccatcacccgcgtgattacattgaatccatggaatcagcgctgaaaagcgtactggcggcattaagcgctgaacaacgggcgatggtggtcggtatcggcgtcgacagcaccggctcaaccccggcgccgattgatgcagacggaaacgtgctggcgctgcgcgaagaattcgctgacaacccgaacgccatgttcgtgctgtggaaagatcacaccgcggtggaagaggcggaggccatcacccgcctgtgccacgcgccgggtaaagaagactactcgcgctatatcggcggcatctactccagcgaatggttctgggccaagatccttcacgtcactcgcgaagatagcgccgtcgcgcaggccgcggcgtcgtggattgagctttgtgactgggtacccgccctgctttccggcaccacccgtccgcaggatatccgtcgcggtcgctgtagcgccggccacaaatcgttgtggcacgaaagctggggtggactgccgcccgccagcttcttcgacgaactcgacccgattattaaccgccaccttgcctggccactgttccgcgacacctggaccgcggatctccccgtcggcaacctgaccgccgaatgggcgcagcgcctcggtctgccggaaacggtggtcatttccggcggcgccttcgattgccatatgggcgcggtcggcgccggcgcgcagcctaacgcgttggttaaagtgatcggcacctccacctgcgacattctgatcgccgataaacagagcgtgggcaaccgcacggtgaaaggtatctgcggccaggtggacggcagcgtggtgccggatttcatcggtatggaggccggtcagtcggcattcggcgatatctatgcctggtttggccgcattctcggctggccgctggaacagctggcccaacagcacccggaattgcgcgagccaatcaaagccagtcaaaaacagctgctgcctgcgctcaccgaagcctgggccaataatccatccctcgatcacctgccggtggtgttggactggttcaacggccgccgcacgccgaacgccaaccagcggctgaaaggcgttattaccgatttaaatctggccaccgacgccccggcattgttcggcggattgattgccgccaccgccttcggcgctcgcgccattatggagtgcttcaccgggcagggcattccggtgaataacgtgatggcgctcggcggcatcgcgcgcaagaaccaggtcatcatgcaggcctgctgcgacgtcctgaaccgcccgctgcagattgtcgcctccgatcaatgctgcgcgttgggcgccgccatcttcgccgccgtcgccgcgggcgtctatccgaatatccctgccgcgcagcgcaacatggcaagcgaggtggaaaacaccctgcagccgcgcgcgcaacaggcgcaacgtttcgaacaactgtatcagcgctaccagcagtggtcggctagcgcggaacaacactatctcccttcggctgcaaaggcggaaaacgccccgcaatctccggcagcgctcacccattaaggatacgaaaatgacgatttttgataactatgaagtatggttcgtaattggcagccagcacctgtatggccaggagaccctacgccaggtgacgaaacatgccgaacatgtggtgaatagcctgaatgcggaagcaaaactgccgtgcaagttggtgctgaaaccactcggcaccacgccggatgaaatcacgcatatttgccgcgacgccaactacgatgataaatgcgccggattagtggtctggctgcacaccttctcaccggcgaaaatgtggattaacggcctgacgctcctcaacaagccgctgctgcaattccatacccaattcaacgcctccctgccgtgggacagcattgatatggactttatgaacctcaaccagaccgcgcacggcggccgcgaattcggctttatcggcgcgcgcatgcgccagcagcacagcgtcgtcaccggccactggcaggataaagaagcgcaccagcgcatcggcgcgtggatgcgtcaggcggtttctaagcaggatacccgccatctgaaagtgtgccgcttcggcgataacatgcgagaagtggcggtaaccgacggtgataaagtggcggcgcagattaagttcggcttctcggtcaacacctgggcggtcggcgatctggtgcaggtggtaaatagcatcagcgacggcgatatcaacgcgctggtcgatgaatacgaaagcagctaccgcctgacgccagcagcgcaggtgcacggcgataagcgccagaatgtgctggacgccgcgcgcatcgaactggggatgaaacgcttccttgaacaaggcggtttccacgcctttaccaccacctttgaagaccttcacggcctgaaacagctgccgggtctcgccgtacagcgcctgatgcagcagggctacggctttgccggcgaaggcgactggaaaaccgccgctctgctacgcatcatgaaagtgatgtcgaccggtctgcagggcggcacctcctttatggaggattacacctatcacttcgacaacggcaacgatctggtgctgggctcgcacatgctggaagtgtgcccaactatcgctaccgccgagaagccgatcctcgacgtccagccgctgggcattggcggcaaggccgatccggcccgtctgatcttcaacacccaaaccggcccggcgatcgtcgccagcctgattgatttaggcgatcgcttccgcctgctggtcaacaccatcgaaaccgtcgcgacgccgcacgatctgccgaagctgccggtggccaacgcgctgtggcaggcgcaaccggatctacgtaccgcctcggaagcctggatcatcgccggcggcgcgcaccataccgtcttcagccatgcgctaaccctcgacgatatgcgccagtttgccgagctgcaggatattgaactgaccgtcatcgacaacgacactcgcctgccgtcgttcaaagacgcgctgcgctggaatgaagtctattacggtagcaaacgctaagcgcacaagcataatgcccgatgacaatccgctcatcgggcagggagaacaagatgttagaagatctcaaacgccaggtgctggaggccaacttagcgctaccgcagcataatctggtgaccttaacctggggtaacgtcagcgccgtcgatcgtgacaaaggggtattggttattaaaccctccggcgtagattacggcctgatgaccgctgacgacatggtcgtcgtcagtctggagaccggtgaagtggtggaaggcaacaaaaagccctcttccgatacgccgacccatcgcctgctgtatcaggcgtttccgacgcttggcgggattgtgcatacccattcgcgccacgccaccatctgggcgcaggccggacaatctattccggcgaccggcaccacccacgcagactatttttatggcccggtcccctgcacccggttgatgaccgatgcggagatcaacggcgaatatgagtgggaaaccggcaatgtgattgtcgaaaccttccgtcagcagggaatcgatccggcgcaaatgcccggcgtgctggtgcattcccacggcccgtttgcctggggtaaaaacgccgaagacgcggtacacaatgccatcgtgctggaggagatcgcctatatggggatcttctgccgccagctggcgccgcagttgccggatatgcagcagacgctgctcgataagcactatctgcgtaagcacggggccaaagcctactacggccagtaatcacccctgtataaaaccccagcacccatcgtgaaaccaggctataatcaggcctggttttttatcgttgagagcacgcgtgacgcagccgcaagcaggatttttactcacccgtcactggcgggataccccgcagggaacggaactggccttctggctggcgaccgataacggcccgctgcaggtcacgctgccgccgcaggaatccgtcgcgtttattcctgaagcgcagcggtcgcaggctgaacgtctgctgcagggtgaaaacagctatcgtctggcccagctcgcgctaaaagatttccatcgccagccggttttcggcctgtactgccgcggccatcgccagctgatgcggctggaaaaaaagctacgtgaaaacggcgtcaccgtttacgaaggcgatatccgcccgccggagcgttacctgatggagcgctttatcaccgccccggtttgggtagaaggcgaaacgcggggttcacagctggttaacgcgcgcatgaaaccgcatccggactatcgcccgccgctgaaatgggtctcgctggatatcgaaaccagccgccacggcgagctctactgcatcggcctggaaggctgcggccagcgggtggtctacatgctgggccccgagcccgctacgccgccggatgtgggcttcagcctggtctacgttgccagccgtccgctgctgctggaaaagctcaacgcctggtttgccgaacacgatcccgacgtgctgatcggctggaacgtggtgcagttcgatctgcgggtcctgcaaaaacacgccgagcgctaccgcatcccgctgctgctcggccgcggcaatagcgagctggagtggcgcgagcacggttttaagaacggcgtctttttcgcccaggccaacggccggctgattatcgacggcatcgaagcgctaaaatcggcgttctggaacttctcctcattttcactcgaggccgtcgcccgcgagctgctgggcgaaggtaaagctatcgacaacccgtgggatcggatggacgaaatcgatcgccgctttcatgaagataaaccggcgctggccacctataacctacaggattgcgagctggtgacacggatctttcacaagacggagatcatgccgtttctgctcgaacgggcgacggtcaacggtctgcccgccgatcgccacggcggatcggtcgccgccttcagccatctctatttcccacgcatgcaccggctgggctacgtggcgccgaatctcggcgaaattcccccgcaggccagtcccggcggctatgtcatggattcccgccccggcctgtatgactcggtactggtgctggactacaaaagcctgtatccgtcgatcatccgcacctttttaatcgatccggtcggcctggttgaagggctggcgcagcccgatgaccgccacagcaccgaaggatttctcggcgcccgcttctcgcgcgaaaagcactgcctgcccggcatcgtcgggcagatctggcacggccgcgatgaagccaagcgtcagcataataagccgctgtcgcaggcgctgaagatcatcatgaacgccttttacggcgtgctggggaccagcgcctgccgctttttcgatccacggctggcgtcgtcgatcaccatgcgcggccacgcgatcatgcgccagaccaaagcgctgattgaagcccagggctatgacgttatctacggcgataccgactccaccttcgtctggctcaagcgcccgcatagcgaagcgcaggcggcggaaatcggccgcaagctggttgcctatgtcaacgactggtgggcgcaggaattgggtaaaagccaactgaccagcgcgctggagctggagtatgaaacccacttttgccgctttttaatgccgacgatccgcggcgccgataccggcagtaaaaaacgttatgccgggatgattcaggaaggcgatgcccagcgcatggtgttcaaggggctggagacggtacgcaccgactggacgccgctggcccagcagtttcaacaggagctgtatctacgcatcttccgccatcagccgtatcaggattatgtgcgggagactatcgccagactgatgaacggcgagctcgatgagcagctggtttatcgcaagcgcctgcgccgaccgctggcggagtatcaacgcaacgtgccaccgcacgtgcgcgccgcgagactggcggatgaacacaacgtgaagcttggacgggcgcagcagtatcagcagcgcggcaccattaaatatgtctggactaccggcggcccggagccggtggattaccagcagtcgccgctcgattacgatcactatctgtcaaagcaattgcagccggtggcggaaggaatccttcccttcgtcaacgacgactttgctacaatagtaacagggcaactggggctattttgacaggtgactaacaccacggcatccagtaccatagcgccctttccattcctggacccaattttgattcctcagcgtaactatgctgaggatgcactattgcctgcaattaaagaacaaagagccgaacacatatgccttttacacttggtcaacgctggattagcgatacagagagcgaactaggactagggacagtggtagcgctggatgcgcgcatggtcactctccttttccccgccatcggcgaaaaccgtctgtactctcgcaacgattccccgattacccgcgtgatgtttaacccgggtgataccattaccagccacgaaggctggcagctccacgttgacgaagtaaatgaagaaaatgggctgctgtcctacaccggcacccgcctggatacgcaagaagaacatgttaccctgcgcgaagtcctgctcgacagtaagctcgccttcagcaagccgcaggaccgcctgttcgccgggcaaatcgaccggatggaccgctttgccctgcgctaccgagcgcgtaagttccagagcgaacagtaccgcatgccgtggagcggcctgcgcggccagcgcaccagcctgatcccgcatcagttgaacattgcccacgacgtaggccgtcgtcacgcgccgcgcgttctgctggccgatgaagtgggcttaggtaaaaccatcgaagccgggatgatcctccaccagcagctgctctccggcgccgccgagcgcgtgctgatcgtggtcccggaaaccctccagcaccaatggctggtggaaatgctgcgccgcttcaacctgcgcttctcgctgttcgacgacgaacgctatgccgaagcgcagcacgacgcctacaaccctttcgaaaccgaacagctggtgatctgctccttagacttcgtacgccgcagcaagcagcgcctggagcatctgtgcgatgccgagtgggacctgatggtggtcgatgaagcgcaccacctggtgtggagcgaagaggcgccgagccgtgaatatcaggccattgaacagctcgccgaacgcgtgccgggcatcctgttgctgaccgcgacgccggaacagctgggcatggagagccactttgcgcgcctgcgtctgctggatccaaaccgcttccacgattttgaacagtttgttgaagaacagcaaaactatcgcccggtcgccgacgccgtcgccctgctgctggcgggcaacaagctcaacgataatgaactcaatacccttggcgatctgatcggcgagcaggatatcgagccgctgctgcaggccgctaacagcgatcgtgaagatgctcaggccgcgcgccaggagctggtttcgatgctgatggaccgccacggcaccagccgcgtgctgttccgtaacacccgtaacggcgtgaaaggtttcccgaaacgcgagctgcacactattcgcctgccgctgccgacccagtaccagacggctatcaaggtctccggtattatgggcgcgcgcaaaaccgcggaagagcgcgcgcgcgatatgctttatccggagcagatctatcaggagtttgaaggcgataccggcacctggtggaacttcgatccgcgcgtcgaatggctgatgggttacctgaccagccaccgttcgcagaaagtgctggtgatttgcgccaaggccgctaccgcgctgcagctggagcaggtactgcgcgagcgcgaaggtatccgcgccgcggtattccatgaaggcatgtcgattatcgaacgcgaccgcgccgcggcgtggtttgccgaagaagacaccggcgcgcaggtgctgctgtgttccgaaatcggctccgaagggcgtaacttccagttcgccagcaacctggtgatgttcgacctgccgtttaacccggatctgctggagcagcgtattggccgtctcgaccgtatcggccaggcgcacgatatccagatccacgtgccgtatctggaaaaaaccgcgcagtcggtgctggtgcgctggtatcacgaagggctcgacgccttcgaacatacctgcccgaccggccgtaccgtctacgacagcgtccatgatgagctgataaactaccttgccgcgccagaatccaccgatggcttcgacgatctgatcaaatcctgccgccagcagcatgaagcgctgaaagcgcagctggaacagggccgcgaccgtctgctggagatccactccaacggcggcgaaaaagcgcaggctctggcggagagcatcgaagagcaggatgacgataccagcctgatcgccttctcgatgaacctgttcgatatcgtcggcatcaaccaggatgaccgcggcgaaaacctgatcgtcctgaccccgtccgatcatatgctggtgccggatttcccgggcctgccggaagatggctgcaccattaccttcgagcgtgacgtggcgctgtcgcgtgaagacgcgcagttcatcacctgggaacacccgctgattcgcaacggtctggatctgatcctctccggcgataccggcagcagcaccatttcgctgctgaagaacaaggcgctgccggttggcacactgctgctggagctaatctacgtcgtcgaagcgcaggcgccgaagcaattacagcttaaccgcttcctgccggcgaccccggttcgcatgctgctggataaaaacggcaacaacctcgccgcgcaggtggagttcgaaagcttcaaccgccagctgagcgcggtcaaccgccataccggtagcaaactggtcaacgcggtgcagcaggacgttcacgcgattctgcagcagggcgaagcgcagatagccaaagcggcgcaggcgctgatcgacgcggcgcgtaacgaagccgatgataaactgacggcggaactgtcgcgtctcgaagcgctgaaagcggtgaacccgaacatccgtgacgacgaactggcggcgatcgaaagcaaccgccagcaggtgatggatgcgctggcgcaggccgggtggcgtctggacgcgctgcgtctgatcgtcgtcactcaccagtaacggaacgcgaaaatggcgatggaaaactacaatccgccgcaggatccctggctggtgattctgtatcaggatgagcacattatggtggtcaacaagccgagcggcttgttgtccgtgcccggcaggctggaggagcataaggatagcgtgatgacgcgtatccagcgcgatttcccgcaggccgaatcggtgcatcgcctggatatggctaccagcggcgtgattgtggtggcgctgaataaggccgccgagcgtgaactaaagcgtcagttccgcgagcgcgagccgaaaaagcagtacgtcgcccgcgtctggggtcatccgcagcctgcggaaggtctggtggatttaccgctaatttgcgactggccgaaccggccaaagcagaaggtgtgttacgaaaccggcaaagcggcgcaaaccgaatatgaagtgctggagtacgcggaggacaacaccgcccgcgtgcgcctgaagccgattaccgggcgctcgcatcagcttcgcgtgcatatgctggcgttagggcatccgatcctcggcgaccgcttttacgccacgccggaggcgctggcgatggccccgcgcctgctactgcatgcagaaacgttaaccatcacccatcccgcctacggcaacgcgatgaccttccgcgcgccgatcgacttttaagtcgttatccggacgccccggtcgcgctacgccgccggggaaatctctaacgctaacgcgattaatcgcgggcaaaccacgcatcaatcatctgttcaacgcgagcgaccaccagcccggtgtcgtgacgacggctgcgtgcgcaggcgtgggccggttcatcgcacagcaggcagcggcgcatcgcttcgccctgcgcctggcggctaatcagccccgcttgcgggcaaatgacgtcgatatcccacaggcgacccagcggatgattctgttccagttcgctgcatagcgctttgatctcttccgcggagtgctcaacgcaccacatcgcttccgggccggtaggcagccacaacacctggcggtcgagcgttttccaacgctgctgccacagaagttggtcacaggcctgcagcgcaacacccatcatattgcgatagcgaatactgtcttttaccgccccaggcgttaccagggtgagagaaatgaccggttgttgataatggttgagccagtcttgttgacgggctgcgcgctgctctttcgccgccagcagattttccatgctgacgcccgcccgggcgggagtatgcactgacattctttcctctcctttaatgatcaaaaaggcagctcggagctgccgtcgctatcgcggataacgccgcctattgtatcgctaattgcacagaatttagggcgcaggacaaagaaattttcttcgtcctgcggagggaaatggcagtttttgctattagcgcagcactaaatcacgataagaaatgacttaagaacagcagccctaacgacacattaatcgcgccgccgatacgggtggctatctgggcgaagggcatcaggttcatacggttgccggaagtcaggatggcgacgtcgccggtgccgccctgcccgctctggcaacaggagacaatcgccacgtcgaccggatgcatccccatttttttgccgacgaagaacccggtggccaccagcgccgacacggtgcaaacaatgaccagcaggttggtcagcgtgaaggcgtttaccagctcctgccacggggtaatcgccacgccaacggcaaacagaatcgggtaagtcaccgcggtacggaagaatttatacaccacctgcgagccctcctgcagacgcggcgaaacgacattcgccagcttcaacagcaccgcgaggaacaacatgccaaccggcgccggcaggccaatcaatttgtgtcccagcatgcccatcatatacagcagcaccgccagcagcgcgccagaggccagcgtcgccacatccgttttaccgccaaatccttcgctttcgctcaggctgcgggtttcattactgcggttcggcattagctggccttcgccggtcagatgcgggaagcgtttaccaagctggttcagacagccggcgatgacaatcgccgtcaggctgcccagcatcaccatcggcagcacgcgtcccagcgcaacgccctgatccatatgcatcagcgccgcatagccaatcgacagcgggatcgccccctcgcccacgccgccggccataatcggcagcacgataaagaagaagacctggaacggatccatccccaacagactgccaactcccacgccgaccaacataccgacaacttcgccgcacagcatcggcaggaagatcttcaggaacccctgaatcaacgtggtgcggttcatgctcataatgctgccaacgataatgcagcagatgtagagataaagaatattggtcgatttatagaatttggtggtggattcaaccaccacatccggcagcaggccgtaatggaccagcgcggaaggaataaaggtggcgcaaatcgccgccgcgccaagcttaccaagtaccggcaggcgcttgccgaactcgccgcaggcaaaaccgaagaaggccagcgtcgccaccatcaccacgatatcgctcggcagcttgccgccaaggcagtccagcgcgataagaccgccggccaacaaaaatagcggcagcgggataatccccactttccagctatccatcacgtgccaccagcgctgcttcagcgaggccttcggtttgttaataggttcaagggttgcagagaatgcgttgtctgtggtgctcataaattcagccctgtagttattattcctgttcagggtagaggggggagcacggcgttaatgtgagaaaaggcagattaaaaaagaagttttaatggtcattatggtttttatggtttctattaatcagcgtgatacatatctgatttctaaacgtggtttttatggtttttttattaaccggataattaccctttataaataggcgccagtagataaattgtccttctggccgctgacgatatcgttgccgcatctcaaatactgtgcgcataactatgaaagtttcatttcaatttaagctgttcatctccctggtggcctttttctccatcttattcgctctgcttggggtctattattatctcgacgccagccgccagctgtatcaggaaatgagcgccagggcgaaaattcaggccgaagagattgcgctgatgcccaatctgcgccagcaggttagcctgcacgacccgcaggctatcggcgccttcatgaagcaaatcgccatccacagtgacgccagctttatcgtcatcggtgatgataaaggcgtgcatctgtttcattccgtacacccggaatgggtcggcacccgcttagtgggcggcgataaccaggcggtgctggaaggcaaaactatcaccaccatccgtaaaggtggtttaggcgtctcgctacgcagtaaaacgcccattgtcgatgataacgggagggtgattggcattgtctccgtcggctatctgaccagctatctcgacagcatcaccgtgcaaaaggtggtgaatatttttgtcgccgccattctgttgctgatcgccctgtttatcttctcctggtattttacccgcagtattaaaaaacagattttttcgctggagccgcgcgaaattggcctgctggtacgccagcaaaaagcgatgatggaatcgattttcgaaggagttatcgttatcgacagccagcgaagaattgaagtgattaaccacgccgcccgcagcctgctggggcttaagcagcccgcgcatctgctgcgcggcaaatcgattgatagcgtgatcgccccgcagccgttcttcgccagcggcgcaatgctggcgaatgatactcacgatgaactgtgtcgctttaaccagttgacggtactcgccagccgggtgcgcatcatgctggaaaactcgctacagggctgggtgatcaccttccgcgaccgcgatgaaattaacgccctcacagctcaactcagccaggtaaaacgctatgtcgataacctgcgcattatgcgccacgaacagctcaaccgcatgaccacgctctccggcctgctgcatatgggccactacgacgaagctattcgctatatacaggcgcaatcggaacatgcccaggagctactggacttcatctcctcgcgtttccgatcgccgacgctatgcggcctgctgctgggtaaagccacccgcgcctatgaaaaaggcgttgaactgagctttgatccggcctgccgtatcgatcgcccgctgtcgtcgctgatggagtctgaacttatttcgatcatcggcaatctgctggataacgccattgaagccacgcaacgcgccgaactaccgcacgagccggtcgaggtactgattcaactcaacgcccgcgagctgatgattgaggtggccgaccgcggtgtcggtatccgcccggatatccgcgagcgtatttttgaacgtggagtgacgacgaaaacccgtggcgatcacggtattggtctgtatcttattgaacattatgtgactcaggctggcggcacgattgaagtcgccgataatgcgccgcgcggaacgatatttactctgtttattcccgccgacccgccagcccatccgcaaccggagaccaacgatgcatcatgatctggtcgatgtgctgatcatcgaagatgaaaacgagctggcccgcctgcacgccgagctcattcagaaacacccgcgcatgcggctggcgggaacggccgcctcgctttcccaggcacggcagatgctgaacgccagaccgccgcagttggtcctgctggataattatctgccggacggcaaaggcgttacgctgatgaccgatccgcttctggccaacgccaattgttcggtcattttcatcaccgccgccagcgatatggaaacctgcagccaggcgatacgcaatggcgccttcgactacattctcaagccggtctcatggaaacggctgagccagtcgctggagcgctttattcagttttatgaccagcagcgggaatggaaaatcgtcgatcagcaaaacgttgattccctgtatcagctgcaggccaaaaattttcgcgccgataacggcagcaagggcatcgaggaaaagaccctggcgctggtgcaaaatttatttcatggccgcgaaacgcactgcttttcagtggacgaagtggtcagcgaaaccggactgagcaagaccaccgcccgtcgttatctcgagcactgcgtagaagtgagttttctggaagtggaaatgctgtacggtaagattggccacccgcggcggatgtatcgccgcgcgcggggcgcgaactaaggcttctccccgcaggagaagcctcacggttttcagaagccgcgctgctctttgatgagctcccaggctttctggatctcctgcgctttctgcttcgccatttccatcatctccggcggcagccctttggccaccagcttgtccggatgatgttcgctcattaatttacgataggcgcgcttgacggttgtggcatcatcggtcggtttcacgccgagcacgttacaagcgtcttcaagggtcgggccgcgctgcgcctgttgccagccgccattgccgccgcgctgaccataggattgctgttgcgagccgccgccgaactgcgcgccgccctgcatcatacgcaggaactgctcgaactgcgcgcgcgagataccgagctcgtcggcgataacaaacaatacttcacgctcattgggatgtaattcgccgtcggcgaaggccgcctgcagctgaatttccagaaacatcctaattaaatcgaagcgaccaaagcagacgctgcgcagctgacgcattttctcgcgcagcggataattatcggccttaccggcgcgaaaagcctgctgcgccgcggtgcgcgactcgccgtgcaggttcattcgatccatcagcacattcgccacatgaatatcggcttccgtgacgcggcctttcgatttggtcagatgccccatcacttcaaaagtggtggaaaagaacagcgactgccgctcctgctggttggcaaataaattcaggcgacggctacgggcccggtcaaacatatggccgactaaaaagccaagcaccacgccccagaagccgccacccatcaataatgcaaccgctacaccaaaactttacccaaatactgcatagactccccaatctttccgctaccagttaagctatatctgaccgcacgttaccaagcgttgacgccacggtcatgtgggacatcgcctataatttgctttatcatactcgccattctacacggtgcctaacgctcagaaacgaaacgagcggattaagactagcgcgattaagatgagtacgttaggctctgaccgtttgcaagccgctgccacaagatgacggaacaacaaataaaacgtatgaaaaaacgtatccccagcctcctggccaccatgatcgccagcgccttgtatagccaacagggcatggccgccgatctcgccacgcaatgtatgcttggcgtgccaagctataatcgccctctcgttgaagggaagcctaacgatcagccggtgacgattaacgccgatcatgcgaaaggcaactaccctgataatgccgtatttaccggcaacgttgatattaatcaggggaatagtcgcctgcaggccgacgaggtgcagttgcatcagcagcagccggcgggacaaccgcagccggtgcgtaccgttgatgcgcttggcaacgttcattacgacgacaaccaggtcattctgaagggaccaaaggcgtggtcgaacctgaataccaaggataccaacgtctggaaaggcgactatcagatggttggccgtcaggggcgcggtaccgccgacctgatgaaacaacgcggcgaaaaccgctataccattctggaaaacggcagctttacctcttgtctgccgggttctgatacctggagcgtcgtcggcagcgaggttatccatgaccgcgaagagcaggttgccgaaatctggaacgcgcgcttcaagcttggctccgtccctattttttatagcccgtatctgcagctcccggtcggcgataagcgccgttccggtttcctgatccctaacgccaaatacagtactaaaaatggcgttgagttctcgctgccttattactggaatatcgcaccgaatttcgacgccaccattacgccgcactacatgaataaacgcggcggcgtgatgtgggaaaacgaattccgctatctgacccaggcgggcgcaggtttatttgaattcgattatctgccgtctgataaagtgtacgaagacgatcatcctaacgacagcaacagccgccgctggatgttctactggaaccacaacgcggttatcgatcaggtgtggcgtctgaacgccgactacaccaaagtcagcgacccggattactttaacgactttagctctaagtacggctccagtaccgacggctacgcgacgcagaaattcagcgccggttacgttaaccagcattttgacgccaccgtgtcgactaagcagttccaggtcttcgaccgtagctcaagcaactcctacggcgccgaaccgcagctggatgttaacgcctatcagaatgacgttggcccgttcgacacccatctgtatgcgcaggcggtgcacttcgtcaacaccaacggcgatatgccggaagcaacgcgtctgcacatggagccgacgatcaacctgccgctgtctaacggctggggaagcatcaacaccgaggcgaagctgctggcgacgcattaccagcagagcaatctcgataagtacaacgcggccaacggtaccgattacaaagattccgttaaccgcgtgatgccagagttcaaaattgacggcaaattggtcttcgagcgcgatatgcaggagggttatacccaaaccctggaaccgcgcatgcagtacctgtatatcccgtatcgcgaccagagccacatcggcgtctacgactcgaccctgctgcagtccgactatagcggcctgttccgcgaccgctcctacagcggtctggaccgtattgcctcggcaaaccaggtcaccaccggtctcacatctcgcgtatatgatgacgcggccgttgaacgttttaatatttccgttggtcaaatctactatttcaccgagtctcggaccggtgcggacaacatcaactgggagaataacgacaccacgggttcactggtgtgggccggcgacacttactggcgcatctccgatgactggggtttacgcggggggatccagtatgatacgcgtctggataacgtcgcaaccggcaacggaaccattgaataccgccgcgacgaaaaccgcttagtgcaactgaactaccgttatgcgagtccggaatatattcaggcgacgctgccttcgtattccaccgctcagcagtacaaagagggtatttctcaggtaggtatgaccgccagctggccgattgtcgatcgttggtctgtggtcggcgcatactacttcgataccaataccaaaaaagcggctaaccagatgttaggggtgcagtacaactcttgctgctacgctatccgccttggctacgaacgtaagctcaacggctgggataacaacagcaacggcggcgagagcaaatacgataacaccttcggtatcaacatcgaactgcgtggtctgagctccaactacggtcttggcacccagcagatgctgcgctcgaacattttgccgtaccagagctccctgtaaggcgtctggtttaaaacgtaatccgcatttgcggttaattgaaatggaaaaagtatgaagaactggaaaacgctgcttctcggtatcgccatgatcgcgaataccagtttcgccgccccgcaggtggtcgataaagtagcggctgtcgtcaataatggcgttgttctggaaagcgacgtcgatggtctgatgcagtcggtgaagctcaacgctggtcaggcgggacagcagctgccggatgacgcaaccctgcgtcatcagatcctcgaaagattgatcatggaccagatcgttctgcaaatggggcagaaaatgggcgtaaaagtcagcgacgatcagcttgatcaggccatcgctaacatcgccaaacagaacaacatgtcgatggatcagatgcgtagccgtctggcctatgaaggcatcaactacaacacctaccgtaaccagatccgtaaagagatgctgatttcggaagtgcgtaacaacgaagtgcgccgccgcatcaccgtgctgccgcaggaagttgaagcgctggccaagcagattggcgatcagaacgatgccagcaccgagctgaacctgagccacatcctgatcgcgctgccggaaaacccgacttccgatcaggttgcggctgcggaagaacaggcgaagtccgtcgttgagcaggcccgtagcggcgctaacttcggcaaactggctatcacctattccgctgaccagcaggcgctgaaaggcggccagatgggttggggccgtattcaggagctgccgggtatcttcgcgcaggcgctgagtaccgcgaagaaaggcgatgttgtcggtccgattcgttccggcgtcggcttccacatcctgaaagtgaacgatatgcgcggcggcagccagaatatctccgtcaccgaagttcatgcccgtcacatcctgctgaagccgtcgccgatcatgaatgacgcccaggcccaggcgaagctggagcagattgcggcagacattaagagcggtaaaacgactttcgataaagcagcgaaagagttttctcaggacccgggctccgccaaccagggcggcgacttaggctgggcaacgccggatatctttgatcctgcgttccgcgatgcgctgatgcgcctcaacaaaggccagactagcggtccggttcactcctccttcggctggcacctaatccaactgatggatacccgcaacgtcgacagaaccgacgccgcgcagaaagaccgcgcttaccgcatgctgatgaaccgcaaattctctgaagaagcggcaacctggatgcaggaacagcgcgccagcgcttacgtcaaaattctgagcaactaaagttcagccctctgcaccacgttaagacgtgccagagggtagaccggtcgccccagcaaacgctgggattgactgcgtagccgggcaataacgagcccgaaggaacgtttctatgcaacgtgttgttatcactcccggcgaacccgcagggattggtcccgaccttgtcgccgagcttgcgcagcgcgactggccggttgaactggttatttgcgccgatggcgccctgttaactgaccgagcccgccagctcggtcttcctttatcgctcctcccctacgatccaacgcgccctccgcagccgcagcgggcaggaacgctcacgctgctttccgtccccctcaacgcgccggtgcagccgggcgtgctcaatgtcgagaatggcggctatgtggtggaaacgctggcgcgcgcctgcgatggctgccttaatggcgaattcgcggcgctgattaccgggccggtgcacaaaggcaacatcaacgacgccggcatcgcctttaccggccataccgagttcttcgaagagcgcgctcacgccagtaaagtggtcatgatgctggcgaccgaggagctgcgggtcgcgctggccacgacccatcttccgctaaaggcaataagcgaggcgattacgccggagctgctgcgcgaagtgattaccatcctggatgccgatctgcggcataaatttggcatcgctcaaccgcacgtgctggtttgcggcctgaatccccacgccggcgaaggtggccacatggggacggaagagatcgataccatcattccggtgctggaagagatgcgggcgaagggcatgaatcttagcggtccactgcctgcggataccctttttcagccaaaatatctcgataatgccgatgcggtactcgcgatgtaccacgatcagggcctgcccgtgctaaaataccagggctttggccgtggcgtgaatattacgctcggtttaccttttattcgtacctccgttgaccacggtaccgcgctggaattagccggtcagggaaaagcggacgtcggcagttttatcacggcgcttaatctcgccatcaaaatgattgttaatacccaatgaataatcgagtccatcagggccatttagcccgtaaacgcttcgggcaaaactttctcaacgatcagttcgtgatcgacagcattgtctcggccatcaatccacagaaaggccaggcgatggtcgaaatcggcccgggtctcgccgcgctgaccgaaccggtcggcgaacgcctcgatcaattaaccgttatcgagctggaccgcgatctggcggcccgcctgcagacgcatccgttcctcggacctaagctgaccatttaccagcaggatgcgatgaccatgaacttcggcgaactgtcggagaaaatgggccagccgctgcgcgtcttcggcaacctgccgtacaacatctcaacgccgctgatgttccacctcttcagctatactgatgccattgccgatatgcattttatgctgcagaaggaagtggttaatcgtctggttgccgggccgaacagtaaagcgtatggtcgtttaagcgtaatggcgcagtactactgccaggtgatcccggtacttgaagttccgccgaccgcctttacgccgccgccaaaagtggattccgccgtcgtgcgtctggtgccgcaccgcaccatgccgtacccggtgaaggatgtccgcgtgctgagccgtatcactactgaagccttcaaccagcgccgtaagaccattcgtaatagtctcggcaatctgtttagcgttgaagtgctgacggagctgggcgtcgacccggcggtacgtgcggaaaatatttctgtagagcagtactgtaagatggccaactggttatccaacaatctgccttcgaaggagagctaaccatgattaattcgcctcgtgtttgcgtccaggtgcaaagcgtctatatcgaatcgcaatcttctccggaagaagagcgctacgtcttcgcttacaccgtcaccattcgcaacctggggcggagtcaggttcagcttctcggccgctactggcttatcaccaatggacacggtcgcgagacggaagtccagggtgaaggggtggtcggcgaacagccgcacatccctgccggcgaagagtatcaatataccagcggcgcggttatcgaaacgccgctgggcactatgcagggtcactatgagatgattgatagcaacggcgtgccgttcaatatcgagatccctgtcttccgtctcgcagttccaacgcttatacattaaaacaatggctacataccttattggcgacgttcatggttgctacgatgaactgatcgcattgctggagcaggtggagtttaaccctgatacggacacactgtggctcactggcgatctggtcgcacgcggccccggctctctggaagtgctgcggtttgtgaaaacgctcggcgatagcgtgcgcatcgtattgggcaaccatgacctgcacctgctggcggtatttgccggcatcagccgcaacaaacccaaagaccgcctgacgccgctgctggaagcgcccgacgctgacgaactccttaactggctgcgtcgccagccgttgatgcaggtggacgaagagaaaaagctggtgatggctcatgccggcatcacgccgcagtgggatctggaaaccgccaaacagtgcgcgcgcgatgtcgaagccgtgctggccagcgactcctatccgttcttcctcgacgcgatgtatggtgatatgccgaaccactggagcaatgagctcagcggcctggcgcgcctgcgctttatcaccaacgccttcacccgcatgcgctattgcttcccgaacggccagttggatatgtacagcaaagaggcgccggaagacgcgcccgccccgctgaagccatggtttgccattccgggccctgtcgctcgcgagtacagtatcgcctttggccactgggcgtcgttggaaggccgcggtacgccggaagggatctacgcgctggataccggctgctgctggggtggcgatctgacctgcctgcgctgggaagataaaacgtatttcacccagcgttccaaccgccagaaaagcctcgacgagggcgaagcggtcgcctcctgagtcgatcccggatagcggcgcgctgcgccttatccggcctacccgcggcgccgtttgtttgccgggtggcggctacgccttacccggcctacggcccgtaccgttgtgagctgaagctctcaactctacctctctccccatggctactgaaactgccggtgttggtggcctcaaaatcgctgagacgttcccggcaggccggggcagcccgcatggatgcgggctgagggccgtgatttgcaaggacgctgcctcggcccgacccgaagcctgcagggataagtcgaaggtaccacgaagtggcgattttggcggccagagcccgggagtacagagggcggcggcgattggccgccctctgtgcgctccctgcgccatgagagacataacgcagaagaaatattgggagcgcaatatgttcggaaacagcacagaacaaccgcttttccaggagcgaaaccattgcaaactgataacagtatctacccacggcgccgtttgtttaccgggtggcggctaacgccttacccggcctacggcccgtaccggacggtaaccgggagattcctgataaaacaaaaccccggccatgcctgacgcgaccggggttttttaatccatgcgatttcgcttaacggcgctcgaggatctcgaagcagtagctatgggagttttgcgcatcggcatcgtggaactcgctgaataccgattcccattcgtccggatcgtaatccgggaaatgagtatccccttccacttccgcatcaatatgggtcaggtagagtttgtgcgcttttggcaggaactgctcgtaaacgcggccaccgccgatcaccataatctcttccgcgtcgccgcaggcggcaatcgcttcatcaacagacttcacccactgcacgcgatcgtcgctgcccggcttgctgctgataacgatatttttacgtcctggcaacgggcgaccgatggattcccaggtcaaacgccccataaccaccggcttgtttaaggtattacgtttaaaccaggcgagatcggcaggcaagtcccatggcatagcgttctccatgccaattacgcgatctacagctaacgccgcaatcagactaatcattgaaaatttcccgaatgcaaaaaattgccgccactatacggaaagcgtaatacttcgtcgactgaacgaagagtaaagaacatgaaaatttttagatttgctggcgagcccacgtaacccttatgagccgccagatcaggaactaaattgaaaacaaaatgttagctgtaaagttaacgcaacatttgcttaccacctcaggttgaaggcttattctccggctcatcgcgaacgtctccggtgtgccgtccttcttcagtaccttgccagccgtggcgctgcaccagcgacagatgattacggtcctcgttgataatgccggtaagcatatcgctggtccgtttaaacaccgccacccgcgaggcggcatcattttccgccatcgccaccatctcttctaccatctgttggttgaaacgacggaacagatcggcgcgctcgcgggcctcataagcgccaaggcccagggcttccagcgtcatgcggccgcttttcagcgccgattcgaaggtctcacgctccggcgcttccacaccggcctggcgcagctgaatgtagtgatcgacatcgcgggcacgcgaaatgatctgcagatgcgggaagtgctctttcgccagctccaccagctgcaggctggcctgcgggtcgtcgatggcgttaatcagcacttctgcctttgccgcccctgccgattccagcagatccactcgcgtggcatcaccgtaaaacaccttcatatcgaacttgcgcagggtatcaacgtgatccggatcgtgatcgaggataaccattttcacgccactggaaagcagcacgcgcccggcaatctgcccatagcggccaaaaccggcgataatcactcgcggctgctcttcatcaatctcgtccgcttcgcgctcctggccgctggcggatttctccatccgcgtcagcagcaccagcaggatgggcgttgccgccatggataacgccaccgccagcgtcagcgccttcgcccattcgctatccagcacatcggccatctgcgcggcgccgaagaccacgaaagcgaactcactcccctgccccagcagcacggcaaaccagcggcgctgcgcgcgcggtacgcccagcggtttagcaatcagccacagcatcagggctttgatcgccaggaaacccaccagcaggatcaggatacgtagcggatgggtgacgagggtaccgaagtcaatagacatgccgacgccgataaagaacagccccaacagcaaccctttaaacggttcgatatcgctttccagcgcatggcggtattccgaacttgccagaagcaccccggcaagaaacgcgcccatcgccatcgacagtcccacttcttccagcagcaatccgaagccgaagaccaggaacaaggccacggcgctgaatacttcgcgcaggccggaacgggcaacgaagcgcagtaccggccgggtcagatagcgccctaacagcaccaccagcgccagcgcgccggcgactttcaacgccgacagcgcaaacgcggccagggtcgttgagccgccgctggccgccagcaacgggatcatcgcaaccaaaggaatagcggcgatatcctggaacaacagcacggcaaaggcgctacgccccagttgcgtcaccgtcaggttacgttcattcatcgcctgcatcgcaatcgccgtcgacgacagcgccagcgtcatcccgatgagctccgcaacctgccagcgcaatccaagcagcatgcagaacagcccgataaacgcgccgcacaccaccatttgcagcgcgccgccgccaaataccgaggcgcgcagcttccataagcgctgcggatccagctcaagaccgatgacaaacagcatcagtacgacgccgatttcggcgaaatgcagaatcgcctcagcgtcagtgaccaagcgcagcccccacgggccgataacgcagccggcgatcaaataccccagtaccgaccccagccccagacgcacggcgatcggcacgataagcgcagcggatccgaggtagatcagcgcctgtattagcgtatggctatccattgtgatgcgcctcctgccattcgattaagcgttgacgataatgacgggcctgcgcctgcagcgtttcgtcatcgcagataaaggtacagtgcatggcaaacggcggcagccatttcatgccacagtacagcgccgtcgcctgcagaggctgcgccagcacgtcaaagccggggaatgaaccaatatcgaaatggctttcgccgccgccggtagtaaccgcccacatcagcgatttaccatgcaacgcaataccattgtggccgtacgcccagccgtgagacagcactttatccatccacagttttagcagcggcggtacgctgtaccactgcattggatgctgccagataaccagatcggcgcgcgccagcgccgcctgctcggcagcgatatcgatattgaagtcgggatatagctcatagagggagcgtatctctacgccatcaagcgtccctgcttgctcaagcatccgtttattcgcatgcgagtgatgcggataaggatgcgagtaaattatcagaatcatgaataggcctgtcttttgtattcttgtagcagtgagtgtagacagttaactcgctcactgaaaggggggaacgccctgggaaaagtcaatcgcaactattggcaagctttcctgtcgtgctgacatggttgccagaaaaccccaccctgctgccgaaaataatccactctacgaattaatgattagcaataatacaatcgtcatatattttaagggaaccttaaagcattatttaataaataaccctatacaccatagaaagtaaatccaataattttacgctcttcgttttgagcccattctttacactaaatataaacactaatttatagcgatatcccggaccgctatttactcaaatggatgtgtacatgagcaataaacactttgaactaaacagaacaaccaaaatgctggcaaggatatttcccgccttattaatgttaacgccaatagttgtcggcgcggcaaccattgaccagtcaacctccgcgccgcaagacttctcggctgatagcgaatacgttattaatagagacgttaccgtctcctccgcagataacaccccagcagtatccgttagcgggatgaacgtagaaaaagtcaccaacgaaggtaatatttccggagcgggtatcggtctggatattaatatcgatgcacaatcagtcgaaattaataataatgaaaatgcaattatttcatctgcaactgataatgccgttaacgtgcaatcaatggcgggtacgtttaataatagcggaatcattactggcgctaacaacggtattttcgttagcgaagagtcatcggcaattagtatcaccaataccgataccggcgtgattaccggcaaaaacggcctgagttcgcaaattggcgtcgggttagataacagcggcgccatcaccggtaccgctggcgatggtattgcgttaagcgacggcaacagcaaaatcaacaacagcggcaccgtgcagggcagcgagaacgggatcaacgttgttgatagcgcgaaagccgatatcatcaacagcggtttactcggcggcggcggcggtacggccgtcatgttagccagcagcaaaaataacagcctggtgctcaataccggttcctcgctcatcggcgatgtcatctccacgggctcaacgggtaatacactctcgctggtcggttctggcacagaagacagcaacttcgtcggcctgaatgacggcgacggttttgcctccgtgaaaatgaacggcgaggcctggacgctcaccggcaacctcgacatcatcggcagcggcgattccctccaggttaatagcggccagttaacgctagcgggcgctgtcgcgaatagcggcaatacgctggtcgcggaagcggctacgctacagttaggcaacgggcagaaaaccgcgaccctcaccggcagcatgaccaacaacggtacagtaatcttcaatcagggaagcgactctacgtttgccaccagcatcatcggtagcggcaacgtggagaaagtcgatgccaataccctgaccttaaccggcaccaatagctataccggcaatacccttctgaaaagcggcaccactctggtcgcggaaggcgccactctcggtgtagcagacagcgacgccaccatcaccatcgaaaatggcgcgcaatttgccagcgccggcgaagtgaataacaacattgatattctcagcggcggtatcctcgcggcgtggaatgcggttgaaggtaacgcaacgctaagaacatccggcgtcgatacgattaacggcaatgtgaccaacagcggtacgctgttactcagcgccgccgataatagcgttggcaacaattttacgattaacggcgactataccggttccgccggcagccagatcgtaatgaacagcaccctcggcgaagacagcgcgccgaccgaccatctgtccatcaccggcagcagctacggccagtctggcgtcagcatcgccaatatcggcgggctgggcgcgcaaaccgtcaatggtatggagattgtcagcgtcagcggcagctccgaagcccagctaaccttatccaaaccggttgtcgccggggcttatgagtatggtctgtatcaacatgacaacggcaactggtatctggaatccaaagcgaccccgtctgacgatccgtcggatgatactgacgatggtgacagcggcagcgatagcggtagcggcactgatggcggcagcaataccgataatggcggtcaatccgcgccagaagtgatggcgccggaagtcggcgcttatctgggtaactaccttgctgcacagagtatgttcctgcataaacgtgacgatcgcgaccagctcacgttccgcaacgaagacaatctgaacacctggatgtacgttaagggccgctatcatgagaacgatgccggcggcgataaagtcagctatgacaccactaccaccgtgcttcaggtcggcagtgatttcatgagcaagccgatggacaaagggatactgcgtgccggcggcatgtttggcgcgggccaggcgaaaacagactcggatgcgaaacacaacgtgcgtgacgcgcagggtaaagtcgacggtttcaacgttggcctgtacgcgacctggcaggaagatccgaaattacgtctgggcagctacatcgatacctgggcgtcctacagctggtataacaacacggtcaccagcaatcgcaacaatgaaaagtatgatagcaaaggctttgccgcctctgtcgaagtcggccatgcatgggtgatcccttcagacaatgcgcgtacctggaagattgaacctcaggcgcagatgatctacagctatctcgatcaggaaaatcataccgatccggatggcgtgcgggtaacgaccgtggataacaatagcctgtttggccgtctcggcgtgaagagcagctatttcgagcaacacgatgttaaagcgtggcagccttatgttgccgtgaactggctgaaaggcgcgggtcaaaacgatctggcattcaatggcgaaaaagtcagcaacgatacgcctgacgatcgcggtcagttagagctgggcgtaaccggtaatgtgaacgagacgaccaccatctcgctgcgcgccagcggcgaatggggtgaaaacagctacgccgcgtatggcggccacattctgctgaatcaccgttggtaatcgctatacactgaaaggtaaaaagcagtggccgaagccactgcttttttttagttatccagctcgtccattgacttcacctggtcgcgattaatctgctccacgcgaccggtttccgcatttttgtaggataccaggcctgtatcatcatcgacctgcggcttaccgctggtcacaattgttttgccatctgtcgttttgagcgactgatttgatgagcaacctgccacaaataccagcgccgttgccgccagcgcggatgccaccagaattttgttccgcattgtatcctcctgtcttttcatcaattggtatcgttatcgtgctaactatagttagcctgacccggcaggcagataaaagcagaactctccgaagatgattgccgtaaaaaaaagggccgacgatatcgtcagcccctgtgtgtcgctatccggcccggccggtacgcttatttagtgatttgcgcgtgcatttcctgcaccgaaatcaccttctcggtcgcatcggcattcagcgccatcgcggtggcgaagccgccgttcagggtggtgtcgtaatgcaccttgtattgcagcgcgctgcggcgaatcagcttggagtcttcaatcgcctgacgtcctgcggtggtgttgatgatgtaggtatattcgccattcttgatacggtcctgaatgtgcggacgaccttcatgcaccttgttcaccagacgcggattgataccggcttcacccagaacaatcgcggtaccgtgggttgcatccagctcgaagccctgtttcagcagttttgccgccaggtcgacaacgcgctctttgtcgccttcgcgaacggagagcagcgcgcggccttgtttcttcatcgtggagttgctgcccagctgcgctttggcgaacgcttccgcgaaggtgcggcccacgcccatcacttccccggtagagcgcatttccggccctaatagcgggtcaacgcccgggaatttgttgaacggcagtaccacttctttgaccgaatagtacggcgggatgatttctttggtgacaccctgctgcgccagcgttttaccggccattacgcgtgccgccactttcgccagcggtacgccggtggctttcgagacgaacggtacggtacgcgccgcgcgcgggttgacttcaatcaggtacacttcgttgtttttcaccgcgaactgtacgttcatcaggccgcgaacctgcagttcgaaggccagtttctgcacctgctcacgcatcacatcctgaatctctttgctcagagtgtaggctggcagagaacaggcggagtcgccggagtgcacgcccgcttgttcgatgtgctccatgatgccgccaatcagcaccatttcgccatcgcagatagcgtcaacgtcgacttcaaccgcatcgtcgaggaaacggtccagcagtaccggcgcatcgttggagacgctaaccgcggtctggaagtaacggcgcaggtcagcttcgtcgtagacgatttccatcgcgcggccaccgaggacgtaagacgggcgcaccaccagcggatagccgatctcttttgccttctcaaccgcttgctcaatcgcggtcacggtggcgttcgccggctgcttcagcttcaggcggtcaaccgcatgctggaagcgctcgcggtcttcagcgcggtcgatggcgtccgggctggtgccgataaccggcacgcctgcggcttccagttcacgcgccagcttcagtggggtctggccgccgtactgcacgatgacgcctttcggcttctcgatgcgcacgatttccagtacgtcctccagcgttaccggctcgaagtacagacggtcggaggtgtcgtagtcggtcgaaacggtttccgggttacagttgaccatgatggtctcgtaaccgtcttcgcgcagcgccagcgaagcgtgtacgcagcagtagtcaaactcgataccctggccgatacggttcgggccgccgccgagcaccatgattttatcgcggtctaccgacgggttggattcgcactcgtcttcataggtagagtacatgtaggcggtatcggtggcgaattccgccgcgcaggtatccacgcgcttgtagaccgggtgcaggttgtagtgatcgcgcagcttgcggatttccgcttcacgcacgcccgccagtttcgccagacgcgcatcggcaaagcctttacgcttcaggtggcgcaggaagtcagcgtcgaggccgttgatgcccacagccgccactttctcttccaggcgcaccagctcttcgatttgtaccaggaaccagcggtcgatattggtcaggttgaagacgccgtcgacggagaggcccgcacggaaggcatcagcgatgtaccagatacgctcggcgcccgcgtctttcagctcgcggcggattttggtcagcgcttccggatcgtcgaggctgactttcgggtcgaagccggtggcgcccacttccaggccgcgcaacgctttctgcagagattcctgctgcgtgcgaccaatcgccatcacttcgccgacggatttcatctgcgtggtcagacggtcgttagcgccagcaaatttttcaaagttaaagcgtggaattttggtcacaacatagtcgatggacggttcgaaggaagccggagtacggccgccggtaatgtcgttcatcagctcatcgagggtgtaacctaccgccagcttcgccgccactttggcaatcgggaagccggtcgcttttgaggccagcgccgaagagcgggatacgcgcgggttcatttcgataacgataaggcgaccatctttcgggttcaccgagaactgtacgttagaaccgccggtttccacaccgatttcacgcagtaccgccatcgaggcgttacgcatgatttggtattctttgtcggtcagggtctgcgccggggcgacggtgatggagtcgccggtgtgaatccccatggcatcgaagttttcaatcgagcagacgatgatgcagttgtcgttcttatcgcgtacgacttccatctcgtactctttccagccgatcagcgattcatcaatcagcagttcgttggtcggagagagatccaggccgcgttcgcagatttcttcgaactcttcgcggttataggcgataccgccgccggtgccgcccatagtaaaggacggacggatgatgcatgggaagccaacttcagcggccaccgccagcgcttcttccatggtgtgcgcaatgccggaacgcgcggtgtcgagaccgatttttttcatcgccacgtcgaagcgacggcggtcttccgctttatcgatcgcatcggcggtcgcaccaatcatggtcacgccgaactctgccagcacgccctgacgctccagctccagcgcgcagttcagcgcggtctggccgcccatggtcggcagcaccgcgtccggacgctctttttcgataattttacgcaccacttcccagtgaatcggctcgatataggtcgcatcggccatttccgggtcggtcatgatggtcgccgggttagagttcaccagaataacgcggtaaccctcttcgcgcagggctttacaggcctgggcgccagagtagtcaaactcacacgcctgaccgataacaatcgggcccgcgcccagaatcaggatactttttatgtctgtacgttttggcatggctcttttactcctgattatttcgcggactgacggtattgctcaattaactcgataaagtggtcgaacagcggcgcggcatcgtgcgggcccgggctcgcttcagggtgcccctggaagctaaacgccggcttgtcggtacgatggatcccctgcagggtgccgtcgaacagtgacttgtgggtcacgcgcaggttggcaggcagcgtcgcttcgtcaacggcaaagccgtggttctgagcggtaatcatcactacattgttatcgatatctttaaccgggtggttaccgccgtggtggccgaatttcatcttaatggtcttcgcgccgctcgccagcgccagcagctgatggccgagacagatgccaaagaccggaatatcggtggtgaggaatttttcaatcgccgcgatggcgtaatcgcacggcgccgggtcgccagggccgttagacaggaaaataccgtccggattcagcttaagcacgtcttctgccgacgtttgcgccggaacgatagtcaggcggcagccgcggtcaaccagcatccgcaggatattgcgcttggcgccgaagtcataagccacgacgtggaacggcagctcgctttccgccttcgcttccggcaggtcgcccgccagtgtccagctcccctgggtccaggcgtaagtctctgcggttgtgacctctttcgccaggtccatgccgttcagaccagggaatgcctgggctttttccagcgccagttgggcatcaagattatcgccggcgatgatgcagccattctgcgcccctttctcacgcagtaaacgcgtcagcttacgggtatcgatatcggcaatggccacaatgttatggcgcttcaggtaagaagaaaggtcttcggtattgcggaagttgctggcaatcagcggcaggtcgcgaatcaccagaccttgtgcatgtacctgagaagattcttcatcggcggcgttggtgccgacatttccaatatggggataagtaagagtgacgatttggcgggaataggaaggatcagtgaggatttcttgataaccggtcattgaagtattgaaaacgacttccccaaccgccgtgccggttgccccgatggcccgaccgtgaaactgggttccgtcttccagaaccaaaagcgctgacttaatcaaaacaccctccagagaatattcactcactttatttgcatattaattcagacatagatctgaatcaatgcaaatttttgcccgcagaattttggcaaacggcggcattctggagagatgtcgggtaaaagtcaacttaaagcagatatttttaaccttattttacgccactggcgcgtaacgggcgatttttacggtaaaaagatcaactaacctggttgagaaaacgcttgcgggcgtggaaaactgtaaaatcactcaccggaggggaaaaaagtggaccagatggtcaaaatttacaatctaataaccataaatcatgagataaagcagatttttaaaccactaacaaagaaaaacaactcaagatggaaaaataaaaaagggcaataaagtattgccctttgcaatcaattacatattgaatgcaataaccacatcacgatgggtaataatcattataaagcattcagatcaagcacatctttcatgtcgaaaagaccactttttttgtctttcaaccacaaagcagaacgaacggcgccattggcaaaagtcatccgactggaagccttatgggtaatttcgatacgttccccgatatcggcgaacatcgccgtatgttcgccgacgatgtcgcccgcgcgaacggtagcaaagccaatggtacccggaacgcgttcgccggtatgaccttcacgactgtagacggcgcagtccttcagatctttgttcaatgcaccggcgatcgcctcgcccatcgccagcgcggtacctgatggcgcatccactttatgcctgtggtgcgcttcgataatttcgatatcggtataatcgcccatcaccttcgccgccttctccagcagctttaacagcacgttgacgccaacgctaaagttagcggcaaagacgatggcaatgtcctgcgcggcatcgctaatcgcctgctttccggcatcatcaaaaccggtggtgccgatcaccatccctttgccgtgctgacggcagaaagccaaatggttgagcgtgccttccgggcgagtaaaatcgatcaatacatcgaaatcatcgtttaccgccgccaggctgctttgtaccgtaacgcctgatttgcctgcgcctgccagctcgcccgcatcgctgcccaccaggcttgaaccttcgcgctccagcgccgcgccaagcgccacgccttccatctgcagcgcagcctgaattaactggcgtcccatccggcctcccgcgccggcgatggccacgcggatttgtgcatcttgcatagctattctcttttgttaacttcacgtgaattgttttcagagtaaccagcccgttgcatagccgctactcaaaaacgccgataattagaaatttatgacaaacggcggtcgatatcagtaaaaactatatgattgtgccgcgattcggcgtttaagtagtagaattcgggtgggggtacggtagcgccccgcccgcgcggtgcgggctaaggcgttgttgtactaaatcaaagagggaaaagctcaccggcgggaaaagcggacaaaaaccaggttaccgccaacaaatcggcgctgccgccggggctaaggtggcgggcaatcagttcgtcatcgaattgacgcaacgcctccagcccgccgtcagccatgacgccgccctgccacaacagccgctgcgcctcctgctgcacaaagttcaggccggcaagcccgccgcgtgagaccagattggtgtcatcattccacgccatcagatgcagcaaggtttgcagcaacgccaggttgctatcgccagtctcttccatcatgcggttgaacaccggtagcgcctgggtacgcacggtacgaaagccgctctcagcctcgccgcgggcgccggagagaccataacgtagaaaatgggcttcgcctttgcttaacggttcgccgctggaagcggagagttcttgcataaccatgccgcgacagaatcgcgccacctggtcgcatagccgatgctgttcaatcggctcgcctttcgataccagccttcccgccgccgcgctcagcaaaccgaaagcgaagatcgccccgcgatgggtattcaccccgccggtgacctccagcatatcgttctcacaggccattcccactggacgcagcatcattaacacctgttccggcacgatcgccgcggtatcgtggcccatgatgaaaaatttctccatccacggcgccaccaccgcggtactggcctcaaacgaggccaggtccatatcgtgatgggcgccagcgttacgaatatccaccaacccgggctttggggtcaggcgaacttcggtcaacagcgcgcgctctaccgcgctgaccacctcttcagcgttcagcggtttcacgcgcagcgaacgctgcggattgattaacacttcgctcattgcccttccccctctgcatttagtcgctgtttttcacctgacgaataacatcaagcacggagccatcgcgatagcgcaccaccgccaccacccgatcggtaaactcgatcggctgcggcttgccggttagcagttccgcacgctgctgcagttcctcaatagtcatcagcggaatgcccgcgttgcgcaaattgtcgatcagatcctggcgcgccgggtttaccgctatgccgtggtcggtgaccagcacatctacgctggctcccggcgtgacgcgggtcagcactttttccacgacgcagggaatacggccgcgaactaatggcgcggtaatgatggtcaaatccgcgccggcggcggtatcgctatggccgccggacgcgccgcgcagcacgccgttagagccggtcatcacgttaacgttaaagtcggtatcgatttccagcgcgctgagcatcaccacgtttaagcgctcgcaggaggcgcctttagagcccgggctggcatactggttggtggagatctcaacgtggtttgggttctgcgccaatgaacgcgccgcgtcgccatcgaacgattgggtatcgagcagcgttttaatcaaccctttttcgtgcaggtcaaccatcgtcccggtgatgccgccaaggccgaagctggcggtaataccgttacggcgcattttatcttcgaggaagcggctcaccgccagcgaggcgccgccggtaccggtctgcagcgagaaaccgtctttaaagtacccggaatgctcaacgactttcgccgcctggcgggcgatcagcaactcacgcgggttgctggtcagacggatcgcgccagcggtgattttttccggatcgccgacttcgtccacctggactatcagatcgacctgatcctgggcgatactggccggatagttaggataatccacccactcttcggtcagcagcactacgcatttggcatgttccgcatcaacgcgcgcgtagcccagcgaaccgcagcgtgatttaccgctaaagccgttggcgttgccaaactcatcgcagcaaggaacgccgagaaacgcgacatcaatcgacagctcgccgttttgaatcagctgtacgcgaccgccgtgggagtggatctgtaccgggttttccatcaaaccggcggagatctcctcgcccaacttgccgcgcaggccggaggtgtagatctggcggatcacgccatttttaatatgctcgatcagcggccagtgggcgtcgatcagcgaactggatgccagcgtcagatcgcgaaaacccatttccgccagcttcgccactaccatattgacgactttgtcaccgccgcgaaacgcgtggtggaacgaaatggtcatgccgttttgcaaaccggaacgacgaatcgccgtttccagcgaatcgcagattttacgctgacgtttttcgctttcgctcgccaaccacgggcttttcgccgtcacgcccgcataaggcgctaacccttccggcatcacgtactgctgattaagcattgttactgtctctttcatcttattccccttaatcacgaataccggaagccgagagcgccaccactttgcgagcatggtcgataatcggtccatcgatcatcttgccgttcagcgataccacgccaagacctcgcgtttcggcttcttccgccgcggcaatcacttccagcgcgtgatcgacctctttgcgcgtcggggcatagacctgatgcaggagttcaatttgtcgtgggttaaccaacgatttaccgttaaagccgaggtttttggccagattcgcttccgccagaaagccctcttcgttattgatatccgaccacaccacgtcataggcggcgatgccggcaacgcgcgcggcatgcagcacggcgcagcgggcgtagaacagttcggtaccgtcgccgcgggaggtgcccatatccatgacgtaatcgaaggccgccagcgcgatcgccgccagacgcgggctggcgcgggcgatctccaccgcgttcaccacgcccagcgccgactcgatcgccgccattaacttggtgctgcccacttcccggccgcactcgcgttcaattcgctcaacatgcgcttccagctcatggatatcttctttgctgtcggttttcggcagacgcaccatatccacgcccgcgcggactaccgcttcaaggtcggcgagaccgaacggcgtattcagcgggttaatgcgcaccacggtttcgatatcctgatacagcggatgctgcagcgcctgatgcaccagcaggcgggcggtatctttttcgcgtagcgaaacggcatcttcaaggtcgaacatcaccgcatcggcgccgtaaacgaatgaagtgcttaacatggcggcattggcgccagggatgaacagcatactgcgacgtggtttcatagctggctccattgtaattgggactgttgcgccgcgcgcagcgccgcggcctgtacgcgggcccgcagtacgcactccagcgcgcctttatcatcgaccaccacgttggcctgcttcacgccaagctgcgccagcgtttctctgactacctgctcaattgcggcgccaaactgctgtttcacaatgctgtcgatttccagctgaatgcccggctgcgccgccggtccaatcctgaccatcacatcgctggattccagcgtgccggccagggcgtcaatcttcatttccataggggaaaatccttagttagggcataaaaatcaggcggtttgatgttcgctttccgccagttgcatcagaaaagagagggtccccggcggtaccagcgccgcgaccgcctgccagttgcgctgtcgatagagttcgcgcactcgggaggccgacacgggtccgccatttttttcgattcgcgccagctcaaccacttcaatgggcggcgcgtcgcctgacgcttccagcagggacttcatgcgctggttgtaattacgggtcaggggacacagcggctcggtgccaacaaagcgatgggtaatctgtagcgccggggccagacgctcgcggaagagctgtaggtcaatctggctgtggcagtcatcaaccaccccctgctctttcaggaaatagccggggaacgtcgcccgcgagatcagatacgccgaaccaggatgcagcgtcaccttatcgatgccggcaatcccctgttcaatgagtttgaagcgatcgtgataggaaaagcaggacgcatcttctttgaccacaaacagatgtagccagtcgcactggctggccgcctgttccaccaaccagcggtggccaagggtgaaggggttggcgttcatcacgatagcgccgatttttcttcccggctgacagtacatcgccagctgtcggcagtaacgagtcagtcgttcgcggctattttccattagcacggcgtggtcgcccgcctgggctatcggccagaagccggcgccggaaaataacgcggcattgcaaggtttagtgaacaaaaacagttcactgcgccccagttcataggccagcgtcaggagctcggtcagtaatttaaggctcagcccttccccctgcagcgagggatcgatggcaatacatttcagcacattgccggcgatagcaccgcagccgaccagccgctgttgatactcggcgacgatcgccatttcacaatcggcttctaacgacagctgatgctggcgaagaaaccgatcgatcgcttctctccgcggtttatcttttaatagctgaacgcgttttaatatcagagtcatttttagcgcttcgttattccaaaacgaactgtatttcgccagcgttcgactgttgatacttgtatttaagtcacagtttttctcgtggcttaattgtctttatggtttttatgttgttaattaattcagcatcattaaaccaattaaattaataaaaaacacgagtattcagtgaaggtaatcacaccttaccactaaagctatttattactatgcgccggtattattactccatcaataaacaggaaaacgtttatgactaacatgagtcaggctccggcgacggagaagaagggcgttagcgacctgctgggatttaaaatcttcggcatgccgcttcccctttacgcgtttgcgttaattacgctattactttcacatttttataacgctttacccaccgacatcgtcggcggttttgccatcatgtttatcatcggcgctatattcggtgaaattggcaaacgcctgccaatattcaacaaatatataggcggtgctccagtaatgattttcctggtagccgcttattttgtttacgccggtatttttacgcagaaagaaatcgatgctatcagcaacgttatggataagagtaacttccttaacttattcatcgcggtattaattaccggagcaattctgtcggtgaaccgccgcctgctgctgaaatcactgctcggctatattccaaccatcctgatgggcattgtcggcgcgtctattttcggcatcgctatcggcctggtgttcggtattccggtggatcgcatcatgatgctgtatgtcctgccgatcatgggcggcggcaacggcgcgggcgcggttccgctgtcggagatctatcactccgtcaccggtcgttctcgcgaagagtactactcaaccgctatcgctattctgaccatcgctaacatcttcgccatcgtctttgccgccgtcctcgatatcatcggcaaaaaacacacctggatgagcggcgaaggcgaactggtgcgtaaagcctcgttcaaagtcgaagatgacgagaaagcgggacaaatcacgcatcgtgaaaccgccgtcggtctggtgcttgccacaacctgtttcctgctggcgtatgtcgtcgcgaagaaaatcctgccaagcattggcggcgtttcgattcactacttcgcgtggatggtgctgatcgttgcagcgctgaacgcctccggcctgtgttcaccggaaatcaaagccggcgccaagcgtctgtctgatttcttctctaaacagctgctgtgggtactgatggtcggcgtcggcgtctgctacaccgacctgcaggaaatcatcaatgccatcaccttcgctaacgtcgttatcgccgccattatcgttatcggcgcagtgctcggcgcggcgatcggcggctggatgatgggcttcttcccaattgaatcagcgatcaccgctggcctgtgtatggctaaccgcggtggttccggggacctggaagttctgtccgcctgtaaccgtatgagccttatctcttatgcgcaaatctcctcccgtttgggcggcggtattgtgctggtcatcgccagcatcgtgttcggcatgatgatttaacccatacgcacgatggcgccgttgagcggccgaagaagttgacccagtcagggaccagcgccgggggcggctgcgggaaatccaccctgctccttagccggaagcgtcgacaagctcgccaaccaacgcgccatcgtgcccttattcgagattttttatgactgatgccgttctgttaggcgaaggcttcaccctgatgttcctcggcatgggcttcgtgctggcgtttctgctgctgctcattttcgccatccggggaatgtctctcgccgttacccgtctgttccctgagccgcctgccgcgcccaaaccggcgcctgcggccgtcgcgcccgccgacgccttcgcccgtttaaagccggcgattgtcgccgccattcaccaccatcgccgccttaatccttaattcacggaggaattcatgaccgttgccattaccgatgtcgtcctgcgcgacgcccaccagtccctgttcgccacccgtctgcgcctcgacgatatgctgcccgttgcggctgcgctcgacgacgtcggctaccgctcccttgaatgctggggcggcgccacctttgacgcctgcatccgcttcctcggcgaggacccgtgggtccgcctgcgcgagctgaaaaaagcgatgccgaaaactccgctgcagatgctgctgcgcggccagaacctgctcggctaccgccactacgccgatgacgtggtggagcgcttcgtcgagcgcgccgtcaaaaacggcatggacgtcttccgcgtctttgatgccatgaacgacccgcgcaacatgcaggccgccctgcaggcggtccgccgccacggcgcccacgcccagggcaccctcagctacaccaccagcccggcgcacaccctgcagacctggctcgacctcaccgaacagctgctggagaccggcgtcgactccatcgccatcaaggacatgtccggcatcctcaccccgcatgccgcctttgagctggtcagcgaaatcaaaaaacgctatgacgtcaccctgcacctgcactgccacgccaccaccggcatggcggagatggcactgctgaaggccattgaagccggcgtcgacggcgtcgataccgccatctcctcgatgagcgccacctatggccacccggccaccgaagcgctggtggccaccctcgccggcacgccgtacgacaccggcctcgatatccacaagctggagagcatcgccgcgtacttccgcgaggtgcgcaaaaaataccacgccttcgaaggccagctgaaaggcaccgacagccgtatcctggtcgcccaggtgccgggcggcatgctcaccaacctcgaaggccagctgaagcagcagagcgccgcccaccgtctggatgaggtactggcggaaatcccccgcgtgcgcgaggacctcggcttcatcccgctggtcaccccgacttcgcagattgtcggcacccaggcggtgctcaacgtgctgggcggcgagcgctacaaaaccattgcgaaggagaccgccggtattctgaaaggcgaatacggccacaccccggcgccggttaacgccgccctgcaggcgcgggtgctcgacggcgccgacgccgtcacctgccgcccggccgacctgctgaagccggagctggcggagcttgaagccgacgtcaaacgccaggcgcaggagaagggcatcacgcttgccgaaaacgccatcgacgacgtgctcaccgtggcgctgttcccgcaaatcggcctgaagttcctcgaaaaccgccacaacccggcggcctttgagccggtgccgcaggtggaagaagccacctctgccgcgccggcaaaagccgccgcctccggtatctacaccgtcgaagtggaaggcaaagccttcgtggtcaaggtcagcgacggcggcgacgtcagccagctgacggcgaccaccccgtcttccgcaccggttcaggctgccgccccggccggcgccggcaccccggtgaccgcgccgctggcgggcaccatctggaaggtgctggccagcgaaggccaggcggtggcggaaggcgaggtgctgctgattctggaagccatgaagatggaaaccgaaatccgcgccgcgcaggccggtaccgtacgcggtatcgcagtgaaatccggcgatgcggtggcggtcggcgacaccctgctgcagctggcgtaaggacgaggagcgcaaatggaaagtctgaacgccctgattcagggcatggggctgatgcacctgcaggccggccaggcggcgatgctgctggtcagcctgctgctgctgtggctggcgattgctaaaaagttcgagccgttactgctgctgccgattggcttcggcggcctgctctccaatatcccggaggccgggctggcgctgagcgcgctggaaaacctgctggcccatcacgacccgctccagctggcggtgattgccgcgaagctcaactgcgcaccggacgtccacgccatcaaggaagcgctggcgctggccctgccgtcggtacaggggcagatggagacgctggcggtggatatgggctactcctccggagtgctggccatcttctataaggtggcgattggctcgggtatcgcgccgctggtgatctttatgggcgtcggggcgatgaccgatttcggcccgctgctggccaacccgcgcaccctgctgctgggggcggcggcgcagttcgggatcttcgccaccgtgctcggggcgctgacgctgaactacttcggcttcatccacttcaccctgccgcaggcggcggccatcggcatcatcggcggcgccgacggcccgacggccatctacctgtcgagcaagctggcgccggagctgctgggggccatcgcggtggccgcctactcctatatggcgctggtgccgctgatccagccgccgatcatgaaggcgctgaccagcgacaaagagcggaagatccgcatggtgcagctgcgtacggtgagcaaacgcgagaagatcctcttcccggcggtgctgttgctgctggtggcgctgctgctgccggacgccgcgccgctgctggggatgttctgcttcggcaacctgatgcgcgaaagcggagtggtggatcggctgagcgatacggtgcagaacgcgctgatcaatatcgtcaccatcttcctcgggctgtcggtgggggccaagctggtggcggacaagttcctgcagccgcagacactgggcatcctgctgctgggggtgatcgccttctgcgtgggcaccgcggccggggtgatcatggcgaagctgatgaacgtgttcagtaaacacaagatcaacccgctgataggttccgccggggtgtcggcggtgccgatggcagcaagggtgtccaacaaggtgggtctggaagcggacgggcagaacttcctgctgatgcacgcgatgggcccgaacgtggccggggtgatcggctcggcgatcgccgccggggtgatgctcaagtacgtgctggcgatgtaagccggcatccttcccgggttgcggctggcgcccaacccgggcaaccacaccagcgcccgactcaatggcttttgatcgggcgtttttctgaaattattggatctgtgtgccatctggtagcacgcaggccgccaaacgaggaaactaactatttaatgtctatcggccctatgtctacccgcaaaatcacccactggtttgcaaggcgatcctttcaaaaccgcatcttcctgctgatcttatttacctcgaccgtcgtcatgttggccatgtcctggtatctgacagacattaccgaggaacgtcttcattaccaggtcgggcaacgggcgctgattcaggcgatgcaaatttcggcgatgccggagctggtggaagcggtccagaaacgcgatctcgcgagaatcaaagaacttatcgaccccatgcgttcattctctgacgccacctacattaccgttggcgatgcgcaaggccgacgtctgtaccacgttaaccctgatgaaatcggcaaatcgatggaggggggcgatagcgatgaggcgctgtataacgccaaaagctacgtctctgtgcgcaaaggttcattaggatcatcgttacggggtaaatcgccgattcaggacgccagcgggaaagtcatcggcatcgtgtcggtcggctataccatcgaacagttagagaactggctcagcctgcagataagttcgctactgatcccgatggcgattatcctgctattactgctgtattgcgcccgccgcttctcgttgcatatcaaaaagcagatgctcaatatggagccccagcagctatcgcaactgctcatccagcaaagcgtgctctttgaatcggtgtttgaagggcttatcgccatagactcaaactataaaataaccgcgataaatcagaccgcccgccgtctgcttaatctgagccagccagagcctacgctaatcggcaaagggatcagcagcgttatttcgcaagaggccttcttctacgatgcgcctcacgagaataagaaagacgcgatcgtcacttttaatcagatcaaagtgatcgccagccgtatggcggtgatcttaaataatgcgccccagggatgggtaattagttttcgtagcaaagatgatatcaataccctcagcctgcagctcagccaggtgcagcagtacgccgataacctgcgcgccgtacagcatgaacaccgtaatttgatctcgactatcgccggactgctgtttctcaaacgctacgatcacgcattggatctgattcagcaacagtcagaaagccaccagaaggtgctcgattttattgcgcgtaatttccaggataatcaccttgccgggttactgatcggtaaatattaccgggccaaagagctcggccttgaactggtgttcgacccatcctgtttcgtcgataaacttcccggcgcgctttcgcacagcgaatggatctcgatcgtggggaatcttctcgacaacgcctacaatgccactttgcgccagccgctgggatcgaaacagatcgaatgtttgattaacagcgatggtcatgaactgattgtcgagatcgccgatcagggttgcggcattgacgaggcgctacgcgatcggatcttcgaacgcggcgtcaccagcagcgccagcggcgatcacggtattgggctctggctggtacgcagttacgtagatcaagcaggcggcagtatcgtcgtcgaaaataatattccttttggcaccatctttactctttatatccccctgacccgagatgaacatcatggatagcatcactactcttatcgttgaagacgaacctatgctggcggaaatcctggtggataccatcaaacagttcccccagttcaacgttatcggcattgcggataaactggaaagcgcaaaaaaaatgctgcgtctctaccagccgcagctgatcctgttagataactttctccctgatggcaagggattggatctgattcgccacgccgtcagcaccaactacaaagggcgaatcatttttattaccgctgataatcatatggataccatcagcgaagccctgcgtctgggggtatttgattacctgattaagccggtgcactatcaacgtctacaacacaccctggagcgcttcgcccgctaccgcagttcactgcgatcaagcgaacaggccagccagacccacgtcgacgccctgtttaatattcaggcccgcgagcaaacagagcccgctgaagcgccgctacgcgggatcgatgaaagtacctttcatcgtgtgctgcagctgttctctgacccgaaagtggtgcataccgctgactctctggctcgcatcctcggcagcagtaaaaccaccgcccgccgctatctggaacaaggcgtcaaaaacgattttctggaagcggaaatcagttatggcaaagtcggcaggccggagcgtatttatcgcggcaagcatccctacccggagcatgcctgaaacacttactcgaggttatagctgacgatcatctgcccttttttcattttcagctggctgataacaatattccccagcgccgccagactggcaacatgggtaccgccgcagggataagccggcaaatcgccaaatcccacggcgcgcaagccattagcgaagatgatgcggcgcggtaaatcctgctgctgccacgcgctcacctgtgtcagcaatgcgctggcttccggtaatacggcgccagcgccggcagcaaacgtaatccgcccctctccaggccagtgatgcgccttcaccggtcgccagcctaactgctcacctgccagtcccagcaaatgaccggctgagtgcagacgggcatgtagctgccgcgcagaggcatcaattcgtatcttcacctcgcccagcggcagcggctgctcaacgatatgcagtacgctatcgccgcgcgtagcgaccgtcattacgacctgctcgtcgatccagccgctatccgacggctggccgccgccctgtggatgaaacagcgtacgatcaagttcaatagcgtaacggccatcggcttcggcgcgacagccgataatctgtgcgcgcccttcggtggcgtcgctggcgtaataaacacgttcagtcatggttgttctcctctctgtcagcacagtatattgataatattgacagcgataatatcctctacaaccaatgcacttttgctccaagggcacaaatgaatttgaaccttctacctgacctcgccctctttgtacaaattgtcgagcaaggcagcttttccgccgtcgcccgccagaacggccttaccccctccgccgtgagccgcagcgtctcgcggctggagcaggagatgagctgcaagctgctgcaccgaaccacccgcaaactacggctgagcgatgccgggaaagcggtgtatgaacctgcgcttgaaatgctggaagcagcgcgacaggccatggactccgccgggagtacccaaacggtggctcagggcaaactgaccctgagcgtgccgaaggccgtcggacgctttgtcatccatccgctaatgatgagctttttcaaccaatatccgcaggtagacgtctgcttacggttggaagaccgcgaccttgattttatcgatgacggcattgacctggcgctacgcatcacccatagcccctcccctggcctgcatggcaaaccactgatgccgatcgctcatctcatctgcgccactaaggagtatttacagcgccacggtacgccgcataccccgcaggatctgcgcgcgcatagctgcatcagccttggcgaaacgcccgccgacgcgcggtggaaatttcgtcgcgaaggcaaaagcgaaacggtgcatacgcatgggcgctacgccgctaaccacaccgccgtgcgtctcgatgctgttaagcaacatctgggtatcggcagtctgccgctgtttaccgctcgcgaagcgctggcaaagggtgaaattgtgcaagtgctgccggagtgggaatttatcagcagctattccggcaatctgtggttgttatgggcaggccataagcatatgcccgccagaatgcgggtgatgattgattatcttagcgagaaggtgccggcgttgaacgcaggcaacacattgtcagccgccaactaaaacgtgttcatattttccagaagctcatctgctgacagcaaaatagctgccagcatgggttgaaatcaattaatgactactggttaattgatttttattataattaataaggccaccggctttgataatctcttgttctgatgaagttaatttctccatatacagcgttatctgccgcaccgggcgatgatcgctaacgacaaaagcggtgatatcacttaactcgcccttcagcgcgctttttattgccgggatatagataaaatcgccaacctcgaaatcaggcgcctccttcatctgcagcggcagcattccccagttaatcacattggaacgatagcgcttggtcgcgtactcctgacaaatatttgccaacccgccaagtactcgctggcagctggcagcctgctctcgcgccgagccatcaccgggtttcaccgcatagatcatgctaccgatctccgtctgtgccgcggtaatattttcctggcccggcagttgccgtatctgggaaaatatattttccagctgtggatttaaacggcaaagatcttcacctttgacgcgttgttgctcgatggcggcaatttttttagcccgctccacatactgcggatcgcgtcgggaaagggtaaattccgccaggcctaatgggtttgaacgaaacgatgatgtttcacctgatggtatcagttcgtcggtagtggtcaccggatccattatttttgaagtaacggctaacagaatattatccgttaacgcattcattttcggccagtctttgatatttgggccatagatcagcggttgctgcgtaacacctttaacgaatccttgataaacccggcttttatagggggaaacatcaaattcatattcctgagcttcgtgccaacaatcaagctccgccgccgaggttaacaatcccccgttagcggccgtcgcggcaattgaacgcgcatccatcagcgccaccgctgacatttgcccatttccaggcttggaaccttcacggttcggaaagttacgcgtcgtatgacggatgctcaagccgttatgcatcggggtatcgccggcgccaaagcaagggccgcagaatgcggtacgaataatggcgcccgcgctcattaaatcattgatcatcccccttttcgttaacgccatcagcaccggctgagaggaaggatatacagaaagcgagaaaatattgtcgccacaggaatgatgcctcagggcattagccgcctgcgccacgttgacatagtttcctcccgcgcaaccagcaataatcccctgctgaacgcgtaatttgccattctctattttgtccaacagagatagcttcgcgcgccccagcgagattttctcagattcaatttcaacttcgcgtaaaatatccggcaaattctgattaagcgtatcaatttcatagacattggcaggatgaaacggtagcgcgatcatcggcttgatagtgcttaaatcgatctcaatgcagccatcgtagtaagccatctctttggctgacagcgcccgatagtctttctctctaccatgaagccgcaaaaagtttttcgtctcttcatcagtctgccagatggaggataagcaggtggtctcagtagtcatgacgtcaatactgtttctatagtcggtcgacatactggccacgccggggccgacgaactccatcactttgttcttcacataaccgtttttgaataccgcgccaattactgccagcgctatatcctgagggccaacgccagcggcaggtttgccggttaaatacaccgcgacgacctcgggataatcaatatcccaggtgtttcccagtagttgtttaactagctcaccgccgccttcaccgacggccatcgtccccagcgcgccataacgcgtatggctatccgagcccagtatcatttggccaccgccggccatcatctcgcgcatgtattggtgaataacggaaatatgcggcggtacataaatgccgccatatttctgtgctgatgtaagaccaaaaatatgatcgtcgctgttaatggtaccgcccactgcacaaagtgaattgtggcaattggttaaaacatacggcaaggggaagcgcgtcattccagaggccttggccgtctggatgatgcccacgaaggtgatatcatgggaagccatggaatcaaactttatttttaatttctgttcatcgccagaaatattatgtgctgacagtattgaccaggcgatggttcccttccgcgcaatatctttagcgacaggatttgcgcactcctcttccggaatgatcccgtactgatgggataaatataccccacgatcgtgtaatttgatcatgactagcatcctttaagatagattaaataataacggtgttcttttattcgtgactctacgaataaaaaggaaagaatatcggcagcaaaataaaactgacaattaccgagatgacaatcagaggtaatccgactctgacataatccataaaccgatatcccccggcggaaaaaatcatcatattcgccggcgtgccaaccggcgtcgcataggcacatgaacagccaatgacaatagccatcaacaccgctcgcggatcagcgcccattgaatttgcaatagacaggccaatgggaataagcaaggccgccgttgcggtattcgacataaaattggttaatacgcaggaaataatcaaaacggcacttaacaataagaacggtgaagcctgttgaccaagcagatcgataattgagcgggccatgattgcaccagcgccagtggtttcgagtgctttcgctaaagctaatgtgccgccaaaaaggaaaatcgtctgcgagtcaattgactgatacgcctgtttttcagtaatcacgcgtgtaataaccaagaataaagcgccaattgaaccgataatcgcaatcggcaaaccaatgacgttctcaaaaatcatccccagtacggtaaataccaacactaaaacagcaattacttgcttatattttggacagtcaactttcctgctcttttctgatttccccgcagtactcacagattgcgctggcaacagtttataaccgatggtcaaaaagtagatgatcccgcaaagcagcatggggatacccagtttggcatactcgaaaaaaccgaagcgctgcccgacttgctccagagctgactgggcgatcagattacccggcgagccaataagcgataagtttccgcccaacgctgaagcaaacgccaatggcatcaacaaacgggattgcgcatagccggacttaaccgcggcaccaatgaccaccggaatcagtaccgcagctgttcccgtattagacagaaaaccagagagtattccgcaaaccaacataataataacgatgagctgcttctccgagcgagcgtaacgggtaacgattccgccaattttatccgtcacccctgtctcaaataaggcgccgccaaccacgaacattgccacaaataaaataacgttctgattaataaaacccgcaaaagccgtttttacatcaaaaacgcctgttacgactaaagtaatacagacgatcatagccgtagcggccagagggattttttcccaaacaaacatcacaattgaaaataacaacagtgacaatgtaattgctactggtgacataaagatataacacctcttttcagcgtgtgaatttaataattagtctaagcaggtgatgcagcgttttataaacttcaagttaaatcactttccagtacattaataattcccaccaccataccccaacggtgatatgcagaataaaagttaacagcgctaatataccgccaacaatccaccaggatttaatatcattataaccaaccccaaatataaccgggccagccgcgccaccataatgggtgaccataccgccataggaattactaaacagcagcgctaacgcggttaacataactggcgcaccggaaacattcgccagcatggcaaagaccggaaccatcgccacaatataggcgctgcccgaggcaaagaaataacgaaccagtatactcaacgcgacgatgacaacgaatgccagcgtactatgactgccaaatgaaatgttatttttcagtaactcggccaaccacaagaaaaaaccaactttggaaagcaaagaactcaaaccaatgataccgccgtaccaaattagtgtgttccagccacctttatttttaatgacatcatcccaggtaacaatttttaatatcagcatcaacgccatgacgcaaatcgccaccgttgattcattaaccccaagcgaagtgctaaatacccaacccgctaacgccatcacaaacaagcaggagagcattttctcacgcaaggtcatcggccctaaagactcaagaccttctttggcaatggctttattatctactttttttaattcgggcgggtatagcttataggttataagcggtgtcagtaacagcatgattaagcctggcaatatgccagccaatgcccatccaccccagctcaatttgatatggcaaatatcctcaatcattttgagcgccaggatattacccgccatggcggtaaagaacatataactggtggttttggtaaccatatagacgttcatcattaaataatgaccaacgcgttttgccgtatgctctggttccgaccctagcgcgacagccacgctattgatgataggtaatacgataccgccagcacgggccgtattcgacggtgtcgcgggtgaaagaatcagatccagaaaggcggtaacatagcctaagccaagtgtggtactccctatcttgccaataagaatatatgcaatccgtttacctaaaccagtaataacaaaagcggcacttaaggtaaatgcagaaaacaccaaccaggtggtacctgatgcatagccacttaatacgctcgatgattttattgaaccatcacctaaattgccaatgataaccatggaggcagccacagcgactaacagtatgactggttcagaaaatggtttaatcactaaaccaacaattgcagccagataaatacctgacaatacccatgcaagttcagtcaacccagccggggccggaaatagactaataagcaatgggatggcaacaagcactaatagcttgcataatgtttttttatccatttcaatcccttacctgaatgaattttataagtgcgcagccgcaattattcagggagataaaccatgccagaaagaattttacgtgcggtacgaatcaccgatgcgcgaatattttcaggagtttcattagcattacttaaactgacgtcaatacttccgctagggtgttcaactctgattaatccctcacccgacattctcgtcagctcgttaactacggtatcagcaataatacaagaactcgccagaccgatagcgcccgtaatagccaacgatttatgacagttatgaggcatgaaataccgaacactcagcgttccaccatgttgaggtggagcaaccagcactggtttaggtattaccatgttcgagacatcgccaaaccccattgccacgcctgcttgcttacgtattgattcaaggcgctgaaaaaattctttatcctgatctaattccgccgccgattcataccctgttttacccaagctatgcgctggaataataaccatcggcatcgccatatcgatacaggtgacgcgaatatcatcaaaaatatcaacccggttgccggttgggaaaagctggcccgatttcgccccggcggcgtttaagaatgtcaggcctaccggggccgcatgccctggaacgccatcaatatgggtatctccttcataaacaacctggccgtccggggtttgaatgtctgcgtcaacaaaggtgttggtattgacgtttctgattcgcacccgcgttactggggaattcgccgcgacaagtcctttttcgatagcaaacccgccgactgcgcacagcatgttgccgcaattaggcgtaatatcaacccgtcgctcattgacaatgacctgtacaaataagtagtcaatatccgcttgctggctggtcgatttactgacaatagccactttactggtttgcggactcccgccgccaatgccatcaatttccagttcatggccagaacccatgatagttaataatgtttcatcacgtttttgaatatcttctggtagatcatctgctaacaggaaagcgccttttgatgttccaccacgcatgagaacacacggaatttgtttcataacatgttccttacaaatataaaaagattaaataaacggggcgtgaatttaatgcacttaatgtatttaaagttttttatttactttattattcatttactcgcacaaccgtttaccatctgattctacttgcaaggaagatagtgattgataaaatataaaaataagacttatacctacaaaacattaataacaactatcgtcatggcaataattaacagagccattctatatataaattatttatttctgattacggagcagcaatgaacaatgaactatccggaatgaaagcttttgtcactgttgccgagctgggttcatttagcaaagcggcagaagtacttaacctgacgcaacccgcattgacccgcaaaatacaaaaaatagaaagtaacctcaatacagcccttttcgaacgaaccacccgaaaaatcatgctcactcaagcaggaaaaatgcttcttccaaaggcaaagtcactgattgccagccttgatgccgccatttttaacatcagcaacctgacttctaatgtgcatgatacggtaacgctttcttgtatcccgacggcggtattttattttttacctcgcgccatcgttcaatttaatcagcgttacccccatatcaaagttcgaatttatgaacaaggtatagaaaattgcatggcctcggtgagaaaaggcgaagtcgattttggaataaatatgaacttcatcacacatcccgacatcgaatttagcccactggttaatgaacccttcgtgctggcttgccggcaggatcatccgctggccagtaaaaaattagtggaatggcgggagctcgtctcgcagagattagttggcgtcagacgctcgagcggtaatcggcaactgattgaaagttgcctgcaggataagccatggaaattagattggttttacgaagtcagacatttatccacctctctgggtctggtcgaggcggggcttggcatatcggccttgccctgcctggccatgccgcatcacgccaacagcgctgtcgtcagcgtgccgctggtcgaaccggtaatcagacgcacgcttggcatgattcgcgttaaaaaccgccctctttccgcagcggctgaacgcttcgcgtcattattactgctcatgtggacggatgaagcgagagagttatggtgtaatgtggtcgattcacaccagcagctataactgtcacggcgcgagagcgaaaacctccgccgcccaacgttgaaaacccgcgacatccaaatccagcgccacctgtgcgttggccggttgtcccagacgcccttcgatatctaccacggtagcgccagccgtccaggtcccctgcgtctctaccgccacaaagcagggtttgagcgtaaacagatccggacgaaccaaccacgcaatagcgcataaatcatgcattctcagaccgctgctcatactgccgctgcgataatggctaaataaagcatgaagcattttgcctgtctgattgagcgtgggcagagtgaccagatagtccgcactcagcatcgccttattggtgacatccagcccgcacatcacaatctccagcccgctctggaagactttcgcggcggcttcaggatcgatggcgatattaaactcggcgttgggggtaaagttaccgcgcccggccgagccgcccatcagcaccagccgacgaatattaaacaggcactcaggatactgcgttatcagcaaggcaatgttggttagcgggccgatggccaccagggtcacgggttccggcgcgtgcatcaacgcatcgcggatcgcctgaaatgccggttttgccagcggttgacggttatgttcgacgaaatcatagccctccatgccggactcgccatgtaccgaggcggcatcgcgcaacggacgtaccagcggcatcgacgcgccttgcgccagcggtacatcggcattccagaaatgcagcagttgcagcgcgttgcgggtcgtcttttccaccgagacgttgcccgccaccgtggtcattaattgcaaatccaactgcggcgagaagagcgcggcggcgatcgccgccgcatcgtcaatacccggatcggtgtcgagaataatcggtaagcgcatggttttctcccaaaaaaaatgccagacgttaagtctggcatcttctcatactgctgggtgaaagaacttattctacttcacggacatctacacgcagctctttcggcacctcgaaaacgatattctcttcacggccttccaacggcaccgcttcgccgccgcccagctcctgcagacgggcaatcacattctgcaccaggatatccggggccgacgcgcccgctgttaccccaacgcaggcagcagacttaacccattgttcctggatatcggtggcatcgtcgataagataggccgctttccccatccgctgcgccagttcagccaggcgattggagttcgaagagtttttcgaaccgaccaccagcaccacatcagcctgctccgccagcgcgcgtacggcttcctgacggttggtggtggcgtagcaaatatcgtctttacgcgggccgacgattttcggaaagcgctcgcgcagcgcgtcgataacgtccgaagtatcatcgacggagagcgtggtctgggtcataaacgacagtcgggcatcgtttttcacttccagcgtcagcacatcctccggcgactcaaccagatacatgcccccttcggggttattgtactggcccatggtgccttcaacttccggatgcccggcgtggccaatcagaatcgactcttcgccgcggcggctggcgcgggcgacttccatatggactttagttaccagcgggcaggtagcgtcgaaaaccgtcaggtcacgactcttcgcttcgttgcgtactgcctgcgaaaccccgtgggcggagaaaatcaggatcgcgccgtccggcacttcgctaatctgttcgataaaaatcgccccacgctggcgcaggctatcgacgacgtagcgattatggacaacttcgtgacgaacgtagatcggcgcgccgtacagcgtcagcgcgttttcgacaatgctgatagcgcggtcaacgccggcgcaaaaaccgcgcgggttagccaacaggatctgcatcttacccctccagcgccggatcgacttccagcacttcaatatcaaaatgaacggtacgcccggccagcggatggttgaagtcgacggtgatggaatcgccgttcacttcgcggatcacgccgggcatttcgctgccatccattgcggtaaagagcataatcgcgccgatttccggctcgccagcgtcgataaactcgcggcgagagaaatactggatcaggtccgggctaggtacgccgaaggcggcgtcaggttccagcgaaaacgtggttttatcgccggctttcagccccagcagatgctgctccagcccttcggaaagcgaggcatcaccaagacgaaacagcgctggtttgccgttgccgcgcgtggattcggcggtggagccgtcatccagtttcagcgtgaagtgcaccagcaccgcgctgttgctctgtacagagttagacatgcaggtttgctcttttatattgccgccgcttgtttgcccggtggcgctgcgcttaccgggcctacaaagggcgatatatactgtaggccggataagacgctttagcgtcgccatccggcaattttttatgatgtttttttatcactggaaggcaagaagccttccagtacaatcagcgccgcgccgatgcagatggcgctatcggcaaggttgaaggtggcgaaatgccagtcgccgacatagaagtcgatcatatcgaccacaaagccgtgccacagacggtcgaacaggttacccagcgcgccgccaatgatcagcgcgtaggcaatattgttcagcttttgcgtcgccttcgaacggtacatcagcaccgccagcaccacgcagataccaacggcaatcccggcgaagaaccagcgctgccagccgccgctgtcggcgaggaagctaaaagccgcgccgtagttgcgcgcataatgcagattaagcgatggaaacagcgaaaccgtctcccccagagcgaagttctggaggatcaggaatttgctgcccagatcgataatcagcacggctacgacgacccacagccagcgtagccccgttgaacagatcgatttactcatcaggcgaatttacgttgctcgccgtcaccggcgacgttactgacacagcgaccgcagatttctgcgtgttccgctaccttgccgacatcgctggtgtaatgccagcagcgtgggcacttctcgccctcggctttgctcaggagcactttcagccctttcagcagatcgctctgccaggcatcggccggcgcctgtgcataatcggcaacgttggcgccggaggtcaacaggacaaatcgtaattcttcgcccagtgcgttaagcttggccgccaggtcagcatcggcatacagcgtaaccgccgcttccagagaaccaccgactttcttatcagcacgcgcctgctcgatcaccttgttgacttcgccgcgcactttcagcagttcatcccagaaaccgtcgttcatcgcttcgtcatcggccaggccgaacaggccttcataccactcgccggtgaagacgtatttttcacgctcgcccggcagatagccccagatttcgtccgcggtgaaggacatgatcggcgccatccagcgcaccagcgcttccacgatatggaacagcgcggtctggcagctgcgacgcgccacgctgtccgctttcgcggtgtactggcggtctttgatgatgtcgagatagaacgagcccatttcgatggagcagaagcgcatcaggcgctgcaccacttcgtggaagtcgtaggattcgtaggctttgaggatatcttcctgagccgcctgcgcgcagccgaccgcccagcggtccagaacgaccatctcttccggtttaaccatatcttttgccggatcgaaaccgttaaggttcgccagcaggaagcgcgcggtattacggatacgacgatagctgtccgcggcgcgtttgaggatctcatcggagaccgccatttcgccggtatagtcggtggaagccacccacaggcgcagaatatcggcgcccagtttgttcatcacgtcctgcgggctaacggtgttaccgatagacttggacattttgcggccctggccgtcgacggtgaagccgtgggtcagtacctgacgatatggcgctttgcctttcatcgccgtggagatcatcagtgaagacatgaaccagccgcgatgctgatcggagccttccagatacatgtccgcggcgtgaccggcgaattccggacgcacatcaaccacagaagagtgggtagacccggagtcaaaccacacgtcgagggtatccggcactttttcgtagctgtcagcgtcatcgccaaggatgtcgcgggaatcgagatcccaccacgcctggatgccgtcaacttcaacgcgtttcgccacttcttccatcagttcgagggtacgcgggtgcagctcgtgggtttctttatgcacgaacagcgacatcggcacgccccaggtacgctgacgggagatacaccagtcaggacggttggccaccatcgattcgatacgcgcctggccccagtccgggatccactgcacgcctttgatctctttcagagactgggcacgcaggcctttttgatccatgctgacgaaccactgcggggtagcgcggaagatgatcggcgatttgtggcgccagcagcacggatagctgtgctgcattttttccacgtgcagcagcgcgccgctatcgcgcagcatctcaacgatgatgtcgttggctttgaagacgttaataccgtccagagacggataagtacctggcaggtaagagccgtccgggccaaccgggttggcgatttccagaccgtatttctggctgatagtgtagtcgtccggaccgtggccgccggcggtatgcaccgcaccggtacccgcgtccagcgtcacgtggtcgccaaggatcgccggcacatcgaaatcgaggaacggatgcttaaagcgcatcagttcaagctcggaaccctgcaccgccgccaggatggtgtaatccgccacgccaatgcgctgcatcacgctttccaccaggtctttcgccaggatcagcgcctggccgtcaacctgcaccagcgcatagtcgaactcaggcgacagagagatggcgcggttagccggcagggtccacggcgtcgtggtccagataaccagcgaaaccgggccagtgacgtcggctacgccgaatttggccaataccgcggctttatctaccgcgtggaacgccacatcgatagacggagacgttttgtcatagtactcaacttccgcttccgccagcgcggaacggcagtcaacgcaccagtgcaccggcttagcgcctttatgcaggtgaccgttgccgatgattttacccagcgcgcggatgatattggcttcagttttgaagtccatagtcaggtacggacgcgaccagtcgcccagcacgccaaggcggataaagtctttacgctggccgtcgatctgctcggcggcatactcgcggcacttggcgcggaattctgcggcggtgaatttctcacccggcttgccgtattgctgctcgactttcagttcgatcggcaaaccgtggcagtcccaacccggaacgtacggcgagtcaaaacccgtcagtcctttggacttaacgataatgtctttcagaatcttgttaaccgagtgaccaatatgaatgctgccattcgcataaggagggccatcatgcagaatgaaggtttttttgccttttttcgccgcacggatgatgccgtacaggtcatcatcggtccaacgcgccagcattcccggctcgcgtttggcgaggtcgccacgcatcgggaaccctgtttccggcaaattcagggtggatttatagtcactcatcagattctcggttccgttatttcggtttgataaataccagtaggattatccctgcctggtgagcccaaagtactcgcgggccgttaactcatctcgtgcgatttgcgcttttagctcatccagcgacgcaaaacgctgctcgttacgtatttttttacgcagtattacatctatatggcgaccgtagaggtccattacaacgtccagaaggtgaacttccagctgctgtcgcacgccggagaccgttggacgagtgccaatgttggcgacgccgggtaatggcttatcgccgagccctgtcacttctaccgcaaagacccctttaaccggggaaacctgacgacgcagcggtaagttcgccgtcgggaaacctatggtgcgccccagctcatcgccgtggacgacgcgaccagagatggtaaacggatgccccagcaggttttccgcctgcgcgaggtcatcgtcggcagcgcctgacgcaccgcggtgctgctaatacgcacgccgccttcgcagaaggtctgggtactggtgacgtcaaaaccgtactccgccccggccttctgtaataacaagaaatccccctgacgaccagcgccaaagcggaaatcatcgccgacggcaaggaaccgcacgcccaactgacgcaccagcagtttgctgatgaaatcttgcgccgtcagcgccgcgaaacgccggtcgaaacggacacacagcacgtagtcgacaccgctttccgccaggtagccaagcttctcacgcagccgcgtgatccgcgccggcgctttatcggcggcaaacagctccagcggctgcggctcaaaaatcatcaccacaaccggcagaccgagctggcggccctctgcgcgcaggcgctgcagcagcgcctgatgcccgcgatgcacgccgtcgaaatttccaatggtcagcacgcacccgtgcggggcctgactgagattatgtatgccgcgtatcagcttcatgtctggctcaaaacagtgaaaatcgtccgagtataccttgtacaacaggcgacgttaaccagcgattgcacctcgattacgaaagatcctgctaattcattcactcagcgtaataatgcaggaaaaactatacgcagccgtcgatttttatggtggaaagactgtattcgactacaacaagctggtagaatcttgcgccatcactacgtaatgaagcctcgttatcttaaacggcgcttatttgcacaaatccattgacaaaagaaggctaaacgggcatattcctcggcctttgaattgtccatatagaacacatttgggagttggaccttggctaatatcaaatcagctaagaagcgcgccgttcagtctgaaaaggctcgcaagcacaacgcaagccgtcgctctatgatgcgtactttcatcaagaaagtatacgcagctatcgaagctggcgacaaagctgctgcactgaaagcatttaacgaaatgcaaccaatcgtggaccgtcaggctgctaaaggtctgatccacaaaaacaaagctgcgcgtcataaagcaaacctgactgcacagatcaacaaactggcttaatcgcccgcttgctgaactttgttaaaaaaacccgcgaaagcgggtttttttatgtctgttgtttgccggtacttagttttgcggctgcgcaaatagcgatgaataatcgcggttgcagatacgctgtaccgcgggatgctgaatcattcgctcggcaaaaatagcgtgatactcctccatcacgttttccatgcggccaatttcaacaatcgactcatcggcatagaaatcgtgagcatagagggttggcgccacaaaaatcgcattatgcgccgcgccgaaggctttcataagcgccgcatcgtcgaactcgccgagaatttccacctgcagcccctgcgaattaaaccagttcagcaatttgcgcccgagcatggaacggcgaccgggaatgagcagacgacgttcctcaagacaggcgggaaacggtttttccggcggcggattcatacaccagaagctcaccccgcattcaccgattttcaccgagaacagcccttcctgctgggttgaatcaatcgggcaatccgagataatcatatccagcttatgctggctcagttgctccagcagcatctcgtgggtggattcaaaacagcgcaggtgaatttgttcatcttctactaccgccgcatccagaacgccgctcaccagccgcttggatagcgcatcggcgacaccgacatcaaacagcaggttcgactctttgcgataattgacgatatcgagcatctcctggctcagggtgaacatgcgatccgcgtagcgaaacaccagctctcccagctcactgggttccaggcctcgtcctttacgtttaaagagtttgccctgtaatcgttcttccaacgccttaatctgcccggtaatcgtctgcggcgtcagatacagcgcctcggcggcgccgacgaccgagccttcccgatagacgtgccagaagtagtacaaatggttgtaattgatatgcgacatgcttctctccctgatatgccccggagagcccgcaggctctcccgatgatgttacacgctgtgaggatccgttacgcgcttacgcagaatcatgtagccaatgatggctgacagaatcgacccgatcagaatgcccagcttggcccagttgatcaatccggggtcaacgctactgaaggcgagcgtggcgatgaaaatcgacatggtgaagccgattccgcacagtacgccgaccgccataatctgcgggaagcgggttcctggcggcaacgaggcccacttaaacttcagcgccagccagcagaacaggctaatgccaagcggcttaccgacaaacagcccggcaataatccccagaggcagcagcgaagtcagccctgcgaacgtgacgccctgcagcgaaaccccggcattggcaaaagcgaacagcggcaggattagaaacgcaacccacggatgcagcacatgctcaagctgcttcgctggcgatttaccattctgctccttcaacgggatcataaagccgacgataacccccgccagggtcgcatgtacgccggatttcagtactgccgtccacagcaccgcgccaaccaggatatagataccggtgcgccgcacgccgcagagattgagcgccgccagtaccacaatcgcgccagcggcgacggccaacgacagtaccgacagatcgttggtataaaacagcgcgataatcacaatcgccccgaggtcatcaataatagccagcgccatcaggaaaattttcaacgccgttggtacccggttgcctaatagcgccaaaacgccaagcgcaaaggcgatatcggtcgccgccgggatagcccacccttcccgcgcaacgggatcctgggcattgaaggctaaatagataagcgctggcaccaccatgccgccaatcgcggcaaccaccgggaacaccgcctgacggcggctggcgagcgccccctggatcatctcacgcttcacctccaggccaattaacaggaaaaacaccgccattagcgcatcgttgatccacaacagcatgtttttgttaatttccagcgcgccgacgcgcagctgtaccggggtatctaaaaaagcatgatacagaccgctggtgacgctgctattggccataatcatcgccagcgcggcggcgcagattaggataatgcccccggaagcatcgctactgaaaaatcgttgcagatgtttcacttttactctcaccttgttggtcaataactcgataaaagtatgatacagccgccaacacatcgaaaaaaacagatttaaattgccattaagatcgcttttttcgatcattaacgacatccgttaatcatagaccacccgcaacagagtgagctgcttgtcggcatcgagataaattttttccaccgttgcataagccgaagccagcgaagtggtgatattttccacaatcacgtggcgctcgatacgatcggcgcgctggcacaaaatctcgctactttccgtttcgttccagcagctttcagtaactacattgccaaaaaattggatattaccggcagtgtgagcccgcacgccgccaattgttaacagtgaaatggccgccagccctaaccagtctttcttgaattgcatacgccaaatcctcggtctgaggaagctgataaccgggtacagcgccccggtcgctgagacttaacctttagctttctgaattgccatctgcaacgcatcctgcgacgtgctgcccggcactaccgagatacgcccggcatccggagccgctgcctgcggcatcaccacaaaagccggggttccggagaaattcatatgctgcgccagcgcctgattgctcagcagcgcatcatgtaccgccccgctctgctgggcagttttaaccgccttaatctgcggctgggtgagatagtgcgacgccagcgcgtaaacatcctgctcggtgagctgtccctccactttacccgtggcgtacagggcattatgccaggccaaatactttgccccgccagcgttcagccacacctgttcgccgattctcgccgccaaaccagacaccggccagcgggatgaaaagatcggaaactctttaaagataaaacgtgtatcaggattcgatttcaccagttcttccactactggcgacatcttgctgcaccaggaacactggtagtcaaaaaacatcaccaccgccgctttagcatccgccgggccaacggaaggagagttgccgctcagcagctcagagcggtactgcagcgccagctgcgcataagcctgcttctgggcaacctgctggcgctgatgtagcgtttcgctggcggcaatcaggaattcgggatgatccgccagataggtcgctaccgcttcgccaactttatccggatggctggcgatatacgcctcagcggtcggcccaatatcacctaccgccgggtcggtcttcgccgccaacgaggaaaaagagatgatgccgccaagcgctagccacgccgccgatttacaggaaagtttgcgcattattgagttctcattattaagttcaggggatgcccacaggggcagaataaaatcgtcatcaccgttgtatcgttaccgtgaccggcggcatcacgcccccggcatcgttgaggctttgccaccgcacggcgcagcgcgtcgtttgtcgacaccagtctgtgcggcgggtagaaaacggcgcgaccacaccggcagcgtcgatcggcgtaccgttgacgcggattgaaaagagggtgacgtaatagggtcctggattacgtaccgtcagcccatccgccgttaagttccagaccagatgacgataggcctgctgcggatcgccgattagccccacaggtcgataaatcagttttaacgccgagcgaaatgccatctgcacgctattggcgccggtttttcccgatggaatagcggcaatgctcagcgtaaacaagctttcacggtcccgcgccagcgcctcgccgctccatgcgacacgcagtgtgttctcctggcctgcgcgcaataaaaagagcggcggcgtgaccacgaatggcggttttcggggcgacaaatcatcggcccctggccagcgtccaccgctcagtacgtggctgtccaccagccagtcactatccgaggtattgcgcagcggaacgctcagcgtcgtccgctcggcgtgataaataaagcgcgtgccaccaatcaccacgcctgcatggcttattgctacgggcagcagccagagccctggccagtagaaaagtcgtctattcataactcagtacgaaagtcgcggaagcatcggcagcccccggcgccaccggggcgccatcagccacatagcgggcataaaactgtaaacgttcggacgcggcgcccgcggttagcgccagcacatcactctgcgcccccggcgcgatttgctgtttattcttgtcatagagcgcaattcctataccgcttgcggtatccgctccggtattcaccgcaaacaaatcgccatcttgcggatcgctggtaccgctaaagctcaccgttacgccgctggcggtgctgccgcaattttgtagcgtgatcgaaaaaggctgccactccgcgccggcgcctgcctgataaaactggcggttactaacggttcccatatcgacctgaatgttctcggaatccggcgacagcgtgcaggtgttgtcggtaatggttccggtgacgtagacccggccgtcatgggccagcgcaccgcttgccaccagagccagcccccagcagaggtacagttttttaatcattgccgcgcgcctattcatattgcaggtcgaaatacatcaccgccgtcgcattgccggaggtcacggttggccgggtagatttgtagcggatatagaacgataaggtattgcggcccgttttcagcgggtagaccaccgaactggtgttattgatgctgaccgcatcctggtcctcatcaaggatctccacgccaacgccgcttgccagcattttttcgctacccatgccggtatcgctcaatgccagcagcgccgggttgtcgctgtcggcagtgccggtaaaccagattttgctgccggtaatgccgcgcgagcagtttttcaggttgatgttgaacggcttaaacttcgtcgtcgtaccggtagaggggaaatcctccactgagaactgacctaaatcgatactctggctgaggctggaaatttcgatatcgcaggtttgcgcgacaatggtcccggtaaattccaggttgtagccgctatcgtcggcatagcaaccgctgccgcatagcaggatcaataagaagaagtaacgaatcaggcgcatttagtcgaaatccacccgtaagttagccagcgcggtgaaggcgccctccgccggcgtctggccggtggtactgactggatacgcctgtagggaaatagtcgcgtgtccgttttcatccgtcgtgaaaggctcgacgctgctggcgtcattcggcgttaataccgcgccgtcgctgctctcaaccaccacgccaacatcaggattgtcagaggcaatggcctggcttaagtggctatcggcggtggctatcaaccgcagacttaagttgacctgtgaatccaccccactgcacttcaccggcacggtgaatcttttcttacggacaccgctcggtttttccccggcgcgattgaagccgccgctgtacagcgagccaaaatccacaagaatggtttgcccggcgttaatttcgcagctttgcggcactgtcacactgccgctgtagacaatgctgtacaccacattactcagtggatcgtcgccagtggtagtgacatagacattaaacatggtcttcggctcgatatttaccgtgccaataaatggcttcacaaccttaagctggaataccagattcgaatcatgtaccggaaaaggcgagccattgttaacgttggcgtcatagcccatatagacataatccattggtggataaaattccccggccgccgaatcttcaatgcgcattgctccttcaagataggtgccatccagctgcatatatttccagtcgccgttggtttccactatcgatgaagaagcgacatacgaacgatacgtccgccccgaatccgaagagccggcgggacaaaccgcctgcacgttcacatcctggtttttactaagttgcgtggtcgtaccggcctgattctgcgccgccgttagcgtcgtcgtcaggtcataatcgaccgttgcaggcgagccattggtgttctggcaaacggccgccagactaccgcgggccagcagcagccccattaacagcacaagaaaagagacaggcttcatttagcgacattccagatgctgacgcgccaaagactggctaacgtcagggagatgataatgagtgagacattgttggtcaggatgctgtccccattgtgctttcagcgtaccctgcgggctaaggcctgagagatacacttccccgtcgtcgccgacgatgccttcttcaggcgagccagcaatggaaaccgtggcgccaaacggcagcggtttcccgtaacggcttaacgtcaacagcgctcgctcgccaacccgtgccgtaaagttggccagcaccagcgcgccttgggtgggaacgacattgatcaccgcatcatcaatatcgacatcgtcttttagcgagttgacgtccagcgccatacggttctggcgataggtagtggcatacggcaccaccgcgtagccgcggctatcggtgtggatccccggctgatcttcaatattgacgtttcctgcccccggcacggcaataaggacattggtatcgcccagcggctggctgagcgtcaagccatgggcatgcgcgactattccgccgctgaggccataattcagttgccgataatcgccatgattgctgttgttgtagccgacattcagattgcccttcgcgccatcgtattccaggctggcggaaccgctctcgccaacgccccgattctggtatccctgctgaacgctgtagctcaggttgttttgaaccaacaacgtgccgctgataccgttattctgcgttacgccgccgtggccatcgctactggtggagaacgtcgcataaacgttatgacgccgctgggtaatatcgtcgccgtgagaaagccactggctgagcggtaatgagatattgagcgccagcgcctggtcgcgttcctcctcgccgggcgtgcggctgctgctatatgacaggctccacgagatcccggccagcgtgtcgctgtagccaatttgtagcaatttattggtttcatcggtgtgccaatagctctgttggctaccggtgacatacagtgagccaaaatgaccgaactgttgagagaggttgatctgtaccttgccgcgtttggtgtaatacaggttgtagtcatcgccagtatcgcgatcgccgtcatcctcctgcgggtcgttatagcctgacatccgcttccacgcggtatcatcaagggtataaaaaccagaggttgagtagcgataccccaacaattgaaaatgggtgcccaggtcgtttaaggatttggcatataaaaagcgcagcgattgcccctgatgttcgctctcatccgccagcgtactgtaggcttgcgtaagatcgacggaaatcgccccccagtcgccgaagttagctccagtgcccagcgccagcgcgcggtaatcggaggaaaactgcgttccgccgtacagcgtaaagccatgcggcaacccccacatcagggtcgcctggccgaaactcacctctcgtttttggctgctatcaccgcgataggtcgccgcggtggcggcatatttcacccgcccctcgcgttgcagaaccggtacggcggcatagggtacgctataactggagatgctaccgtcggactccttgatctcaacgttgagatcgccgctggaggaggtcggatagagatcgtcgatggtgaatgcgccaggcggtacatagcgctggtcgatggtgtagccgttctgacgtatcgtcacctgagcgttgcttttggcgatgccgtggatagtcggcgcgaagcctttcatgctgtccggcagcatattgtcgtcagacgccagctgtagcccacgaaacggcaggctgtcgaaaacgcccgcgggggtgtagctatcgcccgccgtcaactcgcctttcagcgccgccacatcacgttcaacgtaggtgctgatgtgctgccagtcgcttttatgttgctgattatcgctgttgtagttccatgtcgagtaatcacgtaaacgccaggcgccaagatttaatccgctattgaggccgaggaaataactatcgctattggcgccgccaacgctgcggtcccggctattcgcaccggtaaacgtatagttgagcaacaacgcattaataccttcatcccagttttgcggcggaatatagccccgcgcccggctgttcagcgccgcctgcggaatgctgatattcagccgctgctgactaaaatcaaaagcggtggaggcggcagggatcgtagccgcaagatcgacgcagtcgcccgtagcggccttcgccaattgtgggaaagcgctaatattcacgttcatgccgttgagcatctcaggcgtcaggcaagcacgaagtccagagccatcagtggcctggttattgacgcgaaaagcgatatcgcgagtcgtcaacaatgcgccattaaggtagacatcgacccgataaacccccggcgcctgaccgttgccttcaaagtgggaaaggtcggcgatcttcgacggatcgtcagataaaaaggccgggttaaaatagttttcggcccagcagctcggcagcgtgcatacgcttgccgagatcagagccaggctgataagcgccggcaatctacccagcgtcaactggcacgcggagacatcgagtttcaacacaatatcaatgactcagacaggtttgcagcggcgtggtggcgccgaaatcgttaattgactggaaggtcgcctgccctgctccgccgtgcaacgttatctcgcttttcggcggcaccattgaattggctaatttctgcccgccaacatgaatatcaaccagcgagacataatagggtgatggattggcgatcgtcaggcggtcgcctgcacgctggcagcgcaacatcgccggagcatctaccgaggcaaccggtaagtgtttggggcggataaatagtttaatgacgctttgcgtggcgatttgcagcgaattcgccgccagcttgcttttattaaccgagggaatggctttactgttgagataaaaaacgctttcgcgatctgtcggcagggaggggccaacgtacataatacgcagcagattttctttccccggctgaatgacgaacagcggcggggtaacgacaaaatcggcgcttctgccgccatcggcattcgccacccacgattggattaaaaatacattattgctggaggagtttattatcggcagagagacctgcttatcaccctgcggataaataacccgggtcgaacccagcgcaataccgcctgcataggccaactgagttactcccagcgccgccagcagcaataacgaaaataaaatcggggtaattcgcgtactcatttttttgataaccacggaggagatgaaatgcatccctccgctgccaacaacggaggagatgcggataccaatcaggaatagaccatgctgaaggtcgcggtcgctgcgacattacctgcagtcgccgcgccggtagcgacataatcaacgctcagcggtacggtgttttcgccattaatcagagtgatcgcaccggaggtgtcgccgatgttcagaacctgtccatccgggccgtacaactgcagcgcaacatttgtcgccgaacccgcgccagcggtattcgccagcgagccggcaagtgaactgtcctgctgaccattaaaaatgaccgccgcattctggctaacggtggtgtcgcaatcttccagtttgatcgagaaatcttctttctgattagcgaccataccggcagccgtcagcttgctggtgcggacctggctcagggtaaccgtctgatcgatagagtcagctgaaacggagcatgcggcattcacaacctgtccggtaaaattcaccgtaccgccggagaccgttgaggtatccgcatttgccgcgcaggtcatcccccctgcagccatggctgtcattaccatcgctaaaagatgttttttcataaataaccttttaaatacacaagtcgaaaataagttaataacgaattttagtaccgagcgctcttcacagagctctcttgttggtaccgggcgcaaaaaacgttaaaagttgtagcgtacagaaatactatattcaatgaatagcaatcccgcgctgatttataagcgccgagcgataattaatttctgccgttatttaattattataaattggccagagagttgcaatcggcagggactgtttttataggaccgccattaactgactgtttttacagtaaataaatcattgtaactgttatttagattcagccattagtaagccaacggtagttttttaacccctaacagacgtccaccatcaatattgatataaccgccttttcgcaattccgaaagaagcttcatggtacgactcctcgatattccagtacgccgttgaataaaattgagaacattgatgctctggcgatattcgtcgttgtaggcggcaatttcgattaataacgcgcgaaccttaagataagaatcaacgccaaccagctcccggtcgcgaacgttcatcaccatcagacgataggcaaggaaacgggcaacgtcgtgccaaagattgcactcatccgtcactttaataaaatccgccagcgagaccgcacgaccacggcattctgtttcagcaatcaaaaaatgctccgggcgggtgggaacatcgtatgtcacgccatagctatctatcagccctgcaagcgaaggggcaaagaccgatagcacattcaaccctctgtcgctgcggcaaatagagaagatcccggactccagtaacacaattcgggtgctctgctctgtatacagcgaaaattcttcacccggctgcacgatgaaaggcttgccaaatggcaggagtgcagaaaataaggcatcaatcgcagcatggggtttagcctgctgagagaaaatatatgagtgcaagacattctcattatcattttcgaaactagttaatttcattatatcttcattaaatatccataatcatatgagaaataaagatatacgcacattagttagccttcaattaataataaataaatactaaatatagaataattgtatgatgaaagcacaaataatcaatcatttattgaataaggtaattctcaaacaaataaccaacaaagatctcaaaatatcaataactatttttaacatcgcacactattacaaatgaaattattttttatgatataacaagaaagtgaaaaggcggcgatccagaatagtacctcttctgaatcaccaccttaacgctacatgaaatagaggaaattaactaaagtagcggggcgctgcgtagtactccgccattttctctgacaaccaaccgccatcttcaccgttggaatgaatagtggtgatactgacggtcgaaccgccgccccacagcacggcaaaaacgttatagtccggcagatttaacgcctgcatctggctccaatcatatccgccatcgcggcgcagaaaatcacccaccgtcgcgacgccataggtcgtgctgttcatcgcggtatttagcagcgttggggtaatggcgttgatatcgctgccaatccgcgaatcccccatgaagaaagtgccacctgacgcaaaatgcgccgccgcaattttactggtcccttccgccactgtcggcatatggccgccggggatctgccacaacatcgccggtttctgcaacgctctggcgacctccttcaccatgcccagatagttaaaccagcaggtagcgttccagccgtagtgggctaaggcatccgggctgaagcagtcgcgttcgaatttatcaaatacgataaaatctggcgcatagtcgccgccgtacacgcccagttcattaatgaagtcagcgatcgccgccccttgttcccgcggcgcggcattggcgcgcagcagccaatctgccgtgcccgtcgcccaaacgttggtctgccagccaaacgcgatgtccggcgcgaactggcgaacgatatagttaatcgcctgtacgtagccgtacaaatcgttgctgaaggtcggcagcgtcggcgcgctgaaaccaggcatcgaagggagcgcattaatcgccgccgccagttggacattgacctgtacgctgttggccttacgcagcgcggtatagccataaggctcctgctgcatggcgcccaggaagtccggattcaggacgaaggttgccggaaccgggtgctggtcatctttccaggattgcgccgccagacactgggtaatgaagctaccaaagtgattgcgtagacgctgttcgtcctgcaggtccgataccgcgctgccgccgctggcattggcggtataaaccaccatcaccggcatcaccgcacggccggcgtcggcctcgatctctcgaaccaaaggcacggttttatggatcggtagtgaggcataatcaaggaagccatcgccgttagtgtccacttccgccgccggaatcggatcgccgccgccatcaaaaccatcatatttaaacagcgcgctgaacgggacattgcgataaagatcgacagtctccgccgcatttaccgtcacgccgccgtgcgccagataattcggccatccttttacctgcagcggaacgccctggataaactcaagcgtgacgttattaacgctttgcagcaaacgcaacggcgcgctgacatcacagcgccacggcgtaccggcgatatacacatccgcgacctgcacgctatattccccggcagataaacgcagcggtaatttctgctgtcgagtatcgctttgcagcacgaaactatactgatgactgccgcagcagaaacgatagcgttgagcagctgcgccctgcggtaagcctaataccgtcaccgcgacttcaacaaagttgtcgctcgcaacgggcgttttttgtagcgcaacgcctgcctgagccgtcgtgcctaccttcggcacgaaggtcgcaggctgcgcagacgttgtcagcaactggttgttcatcgtcgtcggctgcaggcaaatagcatattgatgatttgctaatagccgagtgacgcgctgcggttggttcgccatcagcgtcagggtacgttcgcgtacacctgcttccgaccacagctcaacgacgacttccgcgccttccagttcatcatccgccagcagcagctcgatcgcggcaaagatcgccgctggctgataagcaatctggcaccgttcaacggcgttaccggacgagagtttcaacgtataactttcagcaacgggtgaaattctcatctcgtcgttacacaattccagtaccgtaataccgtagcttcctgcgctcagatcgccaatggtcagcgaagcgccccattcgccggcaaagcgctgctggcggccatccggatactgcagttcgatctccggcttcagcgaggtgctctgcgcctgcgccgggaattgcacaatgatttgtccctggcgtccaggatcatgggccagcgtcgccgtgaggtcgctaagtacgacgggtgtttgcgtggccgaaagataaaattccagcaccgccgatttaccggaagccaacaggtactcgccgtcgttattgattgtgatggtatttttttctgtcggccaaccgccgtcgctggtcagcgtcactgcctgattacccagcatagtgccgctaaatggactgtacggatcgggatgcgcggtcgcggtgaagcctaatttcaactggttaatatcgacggactgcgaatactggttcgtcagcgtcaaggcaatgcgctgataccaactggacgctttcacctcaccggataccagggtcagtgctgcgccggtcatcgtatcatcgacaggcgattcaggttcaacttcatcagcggtgtcatccgcaggtacttcaggttctggctcaacttcatcagcggtatcatccgcaggtacttcaggttctggctcaacttcatcagcggtatcgtccgcaggtacttcaggttctggctcaacttcatcagcggtatcgtccgtcagagttaacgtaaaggtggacatttttaccggtacctgggtggcagccaggctaaaaaacagggtaccgctttcccctgcctgcagtaataattcactactgttgttgatgatgatttcattgaactccagggttccctgggcggtgtcacgcaaagttaatgaacgatccccttttagcgtgcctcccgtattgccccacggatccggatgaccggaggcggtaaagctaattgccgcctggttcaggtcaaccgcgcggtgactttcgtttgtgaaggttaaagtgactttttggtaccagctgttcacatcaatctggctatttttaattacaacggtcatcaacgtgattcctcattccctggtggaaaaaagccccggaaaaccggggctttgtcatggagcccatacctcgttaagcgcagaagtatcagtaagcgcctaagtcagtccatgcgccgctctgaccgcagttcaggtcaggctggtcgccctgggaccaccatttcacctggtagttgtgacctttccagctaacaatttcgaaggtaccccagcttgcgccgtatacggtgttagcatcccacagcgcgtgaggcgcatcctggtctgccgcatcatcggtagaggcgtcatcttcagccggtgtagtatcttcgtctggaaccggaataatgtcagtttcatcttcttcatcagccggttcaggttcgccctgagcagctaatgctggaaccgcagtcagcacaaaacgttgctgagtggaaggttcgttgtagcagtcacgcacaaacagagtgaactggagggtcgttttcgcgctcacttcaggcaccacgaactcaatcacttccgcggctttatccgcgacggtaattccagatggcacgccccagctgtagctcagttcatcatcatcttcatcagaagaacccgcgccagacagttgaacggtagaaccgccgacgaccagcagctcaatagcggcttttggcgcatgattgacgtcagttgtcttatcgtcttcttcggattcatctttttctacgttgatgccttcgaaatagaacgggtccatatcgatgacttcagactcaatttcataaccgaggccttcacgagctgcgttcagcaacacgccattatcctgatcgatagtccaggtaaacataccgcccaggcccagacttgctgcatattcgccctttgcttttactgaacgcggggtatccagggacatgaacagcttggattccgggttatacaggtagtcagcatcagcgacctggtcggtgtagacgttgaaaccgttacggcctttctggttttccagatccaggtagttgtagatcacgtcataccattcattagtgccggattcgaaagtaccggtggtatcgccgttacctgggttataggtgcctttcagcggagacagcgactccagctcaacgttacggccattacgggtatagccggcataaccaatgttgatattttcagcagggaaaccttcagacagcagatgctccacgatagtgttgacaccccaaccgccctcttccagcgcattcaggttggtgtgatgggcaacgctttccgcccacggggtaccgaagaagtcataggtcatcaggttgatgccatacagacctgctttaatcagcgctttcacgttggagtaatcaaaggtcttcacgaccgcggagctggcgatggagattttcacattgctcaggctggcggaatccagttgcttacgtagttcaccaataagcaaggcatagttttcaccatcttccgggccgcaagggttgccagcgccttcagcgttcgggtattcccaatcgatatccacttcgctgaacatcgggaactgtttgaacagtttcaccacgcctttagcaaaggttttacgtgcggaatcagacgctgcggtttcatggaagccgttactcatggtccagccgccgatgctcatggacagcaccaggttatggccctgctgtttggctttcgcctgcagatcgcgcagaccgccaagcagacctttacaattttcttgagtcacggtcttcggatcaacatcccagccgctaacgctgtggccaacgttaacgtaagactggaagtctccccacggatcaaggaaggtcggttcatatttgactttgccgcattgttccgcgccttcggcaaccacatcgcgatactgaccatcatttttatggaagccggtcacacctacgaatccgacaataattttgtcataagcggtcggtgagatattggtcaggtcgtagccgcgaccgcggttatctttagaatcgtccccttgcaggcgaccatcatactgagaccagtcggtataatagccaaataccttcggcttagtggttgctgctttatatttgttatagaccggctttgcgacacgcgctgaagtatagctatagttgctaacttcagttgctgggttaaaaccatcagcggcgttgctggtttcggtaagagtatcgcctttaatcagtttgctggtagccattttaaatttccttttaagtttaaaatttatcgcagttcgttctgcgagaccaataatccatgactcacaaagaatcggataatcacaaaatctcagcaattcatcagcgttaaagaattatttttatgatgtcttatcaggaaacatcagcgtgacatcattgggcaaatgaggtccatctcccggccggagtgacaaaaaacagacagcatattaaatattatttaggtagtaattaatcgtcatttaatttacgtgagattatgtgacaagaatctcctcaacaaataacactacaataaaacagatgacaaaaaatggattaagccatttcttgtgcaatatattcatcggcgacaatcaggatgtgcaaatctaaaggacgacgttatgaaaacatatctcatcaataacaactgtatctacaacgaacagaaatatgaactaagaacaagctcaaattcgcaggttattcgaatgacggcgatgcgttccaaatgtcttagcttcattattgaaaacgctcatctggagattatcgaacgccagaaaatcactaatgagctatggggtagcagaagtcattttgtgaatgatgccaatctaacgcagatactgtatttaatcagacgagacctgaaggcgttgggcataaacgatctcttcattaccatcccgcgccagggattacaggtcaataaggatatcgccattgagaaagtcgaaccaaaaaaaccaaaagccaggaagcagtttttccgtaaaacgctggcagccctgaccaccgtcttttccgtcacgctaggtacaatgatgtacatgcatattcattaattcagggagaaaaaaatgaatccaattattgatggaattctgggactggaaggcggttacagcgccaacccgaaggataaaggcggcgagactaactggggtatcacagaagcaacggcgcgagcgcatggttaccaggggaaaatgagtgaactttctcacaatgaagcctatgcaatcctggaaacggattactggatcaaacccggctttgaacaagtatcgcaactttcctgggcggtggcatttgaactctgcgacgccgccgtgaatattggtccccatcacccttgcacgtggctacagcgctggcttaacgtgatgaaccgcgagcagcagtattatccggatataaaagcagatggcagcatcggcccgcaaaccctacatgcgctaaattcctatttatcgcaacgaggtaaagaaggagaagcggtgttagtgaaagcgctcaactgtagccagggcgcttattatctggatatctgcgaaaatcgccgacaaaatgaagagttcatttacggctggattaaaaaccgagtgacatagttgagataaacgaatccgtaataaaagactcaaggatgagccttttattatctgataatgctatttgagtttcgaaccgccaacagcacttttaactttctctccgaggattttcaaaatcgggccggcaaatacaccgcctaaaccagcggccaacagcaccatgttaaagctaaaccctttttcgatagcaatagcactaaggagaaaactggtaaaacaagatatgactatctgcgtcaggcaggtcataatcccctgatgggcttcgccagcctcttctttattcctgcgaagcaggaaactaacgaacccgccccaggcgccgatagaaataatggtcagaagtatttctacttccagtagtacaacttccgttgtctctaaatgattaggaatagacataatcgctcctgaataactaaagtttaaaaaagattcatcaggagtgtaaacggcggaatagcggaaaggtaatcaaagaacatcatgactaaccacatcatattaatgacggtaagatgaggaaacttaccgtctgaatgaggacagcgtatgtaacatggaaaccgtttcatttatcgctgatatatttctactatttttgttccatgaagcataaacctgcacggatttaaacatcaactcagggggcggttggataaaatttatatcatatttacgctgatttttataaaacaacgccagtttcaaaggtaacagtgcaatcaatgcggttctttctaccatgctaaccagcccggtgatagaatcgctacaatagcccatagtacgtgaaccgttataataaacatcatctttaaataatccgttatcagtgatgatggtgggtgaagtaatccccggttgatacatggcatggcgggaagagtagaattgatgcaaagaaagctgcgacagctcgctgaataaatgacctttggcacaaatacagacaaagtttctgaagctatcaataatttgattatcgagtccgggctcaaccagcggttcagaaccgatcgataaatcacattgagcggtcaataaaagctctttagctttatcgcagctaatgttgcgggatgaaaaatggttgataacgccctgctcgaaaagcgcgctaccgtacagttgggaaaggtaataactttcgatgaaatcgcttccaaggatcgtaatccgggtgtcatcatccttgttttccggcagaaaagtattgtcgacaagcgacatggcctgacggaaactttggtgtatttcgagtgctttcgccgttggcagtaaaccatctttgcttctgacaaacagctcctgctgatagaagttttgcagacgtcttaatgccaaagagaccgcggcgggagtgatggccaattttttcgccgccttcgcggcatttcctgccgaaatgacagcgtcaagaaccttgattaaattataatcaaagcccttattggcacctttcgatcccatccactgtcagcctcttttatcgaaaaaagcaatatagataatactcaaaataaatcaaatccggacatgctaaacaaagtatagcgtttctattcaaggctgaggttgggacagaaaaaagcctgaacagggatgttcaggcttgtgctaataaggtgattaaacgcaattaacgcgttaaatcatcaaagaattttttcacgccatcgaagaagcttttggaacgcgggctgtttttctcacccgtcggaccgccaaaagtttcctgcagctctttaagcaattgcttctgcttgtcattgaggcccactggcgtttctaccaccacgcgacacagcagatcgccctgagcaccgccgcgaacggatttaacgcccttgccgcgcatgcggaacagtttgccggtttgcgtttcgccaggaactttcaggttaacgcggccatccagcgtcggtacttcaatctcgccgccaagcgcagccatggtgaagttgatcggtacttcgcagtacagattattcccctcacgttcgaagatcgcgtgctgtttgacctgaacctgaacgtacagatcgcccgacggagcgccatgctcgcccgcttcgccttcgccagccagacgaatgcgatcgccggtgtcgacgccagccgggattttcaccgacaaggttttggttttttcaacgcgaccgtgaccgtggcatttattgcacggatctttaatcagcgtaccgcgtccctgacagtgcggacaggtttgctgaacagcaaagaagccctgacgcatctggacctgaccggaaccgtgacaggttggacaggtctgcggctgagtacctgatttcgcaccgctgccgtggcagacatcgcactcttccagcgtagggatgcggatttccttggtgacgccacggaccgcttcttccagcgtcaattccatgttgtaacgtagatctgcgccgcgcgccgcgcgctgacgaccacgaccgccgccgaaaatatcgccgaacacatcgccaaagatatcgctgaaatccgcgccgccgccaaagccgccgccgccgaaaccgccgccgcccatgccgccttgttcaaacgcggcgtggccgtactgatcgtaggctgcacgcttctgggcatcagtcaggacttcatacgcttctttgatttctttaaatttggcttcggcctctttgtcaccctgattacggtccgggtggtatttcatggccaggcgcttgtacgcctttttgatttcacgctcttccgctgttttggaaacgcctaaaatctcgtaataatcttgctttgccattggtgtttttcagccccttaacatgcgtgcacgggcggagaggaaacctcttcgcccgtgccagtgttttacccgttcaaagggcgattattttttgtctttcacttcttcgaactcagcgtcgacaacatcgtcatccttcgcgctgctttcttgagcgtcagcgccgccagcctgctgctgagcgtgctgctgctgagcgatttccatcagcttctgggaagcctgggccagcgcctgcatcttcgcttcgatgtccgctttgtcttcacctttcagagaagtttccagtgcggtcagcgcagactcgattgcagttttgtcgtcagccggcagtttgtcgcctgcttcttcaacctgcttacgggtgctgtgcagcagatggtcgccctggttacgggtctgaaccagctcttcgaacttacggtcagattcagcgttagcttccgcttcgcgaaccattttctgaatttcttcttcattcagaccggaagaagccttgatggtgatcttctgctctttaccgctgtttttatctttagcggaaacgtgcaggataccgtcagcatcgatatcgaaggtcacttcgatctgcggcataccgcgcggtgctgggttaataccatccaggttgaactgacccagagatttgttatcggaagcgcgtttacgctcaccctgcagcacatggatggttaccgcggactggttgtcttccgcagtagagaacacctggctgtgcttggtcgggatcgtggtgtttttgctgatgagcgcggtcatcacgccgcccatggtttcgatacccagcgacagcggggtaacgtccagcagcagaacgtctttaacttcaccagtcagtacaccaccctgaacggctgcgccgatagccacagcttcatccgggttaacgtctttacgcggttctttaccaaagaactcagcaactttcttctgcaccatcggcatacgagtctgaccaccaacgaggatcacgtcgttgatatcggaaacggacagaccggcatcctgcagggcaactttcagcggctcgatagaacggttaaccagatcttcaaccaggctttccagtttcgcgcgagtcactttgatgttcatgtgtttcggaccggtcgcgtctgcggtgatatacggcaggttaacgtcggtctgttgagcggaagacagctcaattttcgctttttctgcggcttctttcagacgctgcatcgccagcgggtcgttgcgcaggtcaataccctgctctttcttaaactcgtcaacgaggtagttgatcagacgagtatcgaagtcttcaccacccaggtgggtatcaccgttggttgccagaacttcgaaggttttttcgccgtcaacttcgtcgatttcgataatagagatatcgaaggtaccaccaccgaggtcgtataccgcgatagtgcggttgccgacttctttatccagaccgtaagccagcgcagcggcagtcggttcgttgatgatacgtttgacttccagacccgcgatacgaccggcatctttggttgcctgacgctgagcatcgttgaagtacgcaggtacggtgataacagcttcagttaccggctcacccagataatcttcagcggttttcttcatttttttcagcacttcagcagaaatctgcggcggcgcggttttggtgcctttcacatcaagccaggcgtcgccattatctgcggcaacgattttgtacggcatgatggaaacgtcacgctgaacttcttcatcctggaagcggcgaccaatcaggcgtttaatcgcaaacagggtgttttgcgggtttgtcactgcctgacgtttagccggctgaccaaccagagtttcaccatcctgggtataggcaataatagaaggcgtggtgcgatcgccttcggcgttctccagcacgcgagctgtagtgccatccataatcgctacacaagagttggtagtacccaggtcgataccaataattttacccatctaaacgtctccactaaaaattcgatcaacatgtggttgtgaacctgtaataagggcgaaacgtgcggtttcaactgccctgacatcattttttttcaggttcttcactgcggttgactacaagatggggtcgccctggttttcatcaaggggcaggccaaaaaaatttttctggcaaaacgcaggcgcgagagcaaacgacacgccagacgataaaaatagccggtataacccatacaaaaaataaatagtaaataagaacatattcattggatatcgcactcgttcgccgaagagttggccattatcgccgcgaaaggtaaattgctgaaaaataccccgccagatcatagacagcctctgcacgcctcattattatgccgcgccccaccgcaagtggcggggtaatgcttccctttctaatcattattttgaggaattatgggcaacactaagttggctaatccggcaccgctgggccttatgggctttggcatgaccactattctgcttaacctggcaaatagcggccttttcgcattcgatgtagctatcctggcgatgggcattttttacggcggcattgcgcaaatttttgccggcctgctcgagtataaaaaaggcaacacctttggtttaaccgcttttacgtcctacggctccttctggctgacgttggtcgcgatccttctgatgccgaaaatgggcctggctgatgcgccgaacgcgcacttcctgggcatgtatctcggcctgtggggtatctttacgttgttcatgttcttcggcacgctgaaagccgcgcgcatgctgcagttcgtcttccttagcctgacggtactgttcgcgctgctggcgattggtcacctggtcgataacgaaggcattgttaaaattgccggttgggtcggcctggtatgcggcgcgagcgctatttacctggcgatgggtgaagtgttgaacgagcagttcggccgcaccgttctgccgattggcgagccacgctaatggcctgccgccgcccgcaaaccgggcggcggtgttaaatttaacgctgcagttctccttgcggtaaaaccgcctgcgtcgtcaacccctgacgcagccagatacctaaccccagccccatcagcgacagcgccagtacgtaccaggcaggcgccatcggcgaaacccccatcagcatcgtaacggcgattggcgtcaggccgccgaaaatggcgtacgacaggttgtaggaaaatgagatgccggtaaaacgcacttccgccgggaaagcgcgcaccattacgtaaggtaccgcccccaccacgccgacgcacagccccaccgtcccatacagcagaaacagccgttgcgggctggcgccggaaaggtggtaaaaggcccaactggcgaccgccaacaacaggctaccgacgataaaagtgcggctggcgccgaaacggtctgccgccagaccggcgagtagacagccgatgcacagcataatcgtggcgatgctattggcctgcagggtaatagccggcgcaaagccataatgtttttgcagccagaccggcgacatcaggatcaccaccaccacgccggcggacagcagccaggtgagcagcatcgaaacgatgacggccttctggtgcttaagcgccaccgccttcaccggcaactcctgcgccagcgctttgcgcttctgcatctccagaaatatcggcgtttcctgcagccaacgacgcaggtacatcgccaccaggccaaaaacgccgcccagcaggaaaggaatacgccagccgccgtcgtggataccttgcgtcgtcatgctggtgttgataagcgtcgccaccaccgaccccaacaggataccgacggtcaatcccgcggtcagggtgccgcaggcgataccgatgcgtttttccgggacatgttcggccacgaagacccaggcgcccggcacttctccgccaatcgccgccccttgtaaaatacgcatgagcagtaatagcagcggcgcaacgatgcccatcgaggcataagtcggcagcagaccgatcgccagcgtcggcagcgccatgagcagaatgctgagggtgaacatttttttgcgaccgaccaggtcgccaaagtgggccatgataatgccgccaagagggcgcgccagataacctgcggcgaaaataccgaaggtctgtacctgacgtagccattccggaatatcggccgggaagaacagttcgccgacgacggcggcgaagaagacaaagataatgaagtcataaaactccagcgccccgccgagggcggccagcgtcagagttttataatcctgtcgattcagtgctcgggtgtgttgtgacataactggcgcttcgtccgcagtaatattacgcaatgtgtaaagtaaaaaacactataccgtaaataaaacagcacaccaccggcgatgcaggttatatcagcaatgcattaaattcaggataaagtttcacgtcgtgcacttttcgggcgaaaagctgctacaacgctcgcttccgtctccacatacggcccctcaagcaactgtacacaataaggtacacttgcaaagacaccatgcaccagcaccttaccgtccgcgtctttgactccttcgagagtctcctgaatcgctttcggctggccaggcaggttgaggatcagcgcctgcttgcggatgacgccaacctgccgggagaggatagccgtcggcacaaagtgtaggctaacctggcgcatttgctcgccgaaaccgggcatgacgcgatcggcaatcgctaaagttgcgtccggcgtcacatcacggcgcgccgggccggtgccgccggtggtcaacaccagatgacagcccatctcgtctaccagctcgcacagcgtttgttcaatgatgggctgttcatcagggatcaggcgagtctgcagttcaaagggcgttgtcagcgcacgcgccagccactcttccaacgcaggaatacctttgtcctggtaaacgccgctggaggcgcggtcagaaatagaaactaagccgatgcgtaatttattcatattcattccgttcaaatagtgcaattaagcggaatgatacacgctggagagaattacagacaggattcaaaagaagtagcgtgaccggtagcccggtcacgctgggatgattacagcaggtcgccgatcattttttccagtttttcctggtcgatggcaaacttacggataccttccgccagtttgtctaccgccatcggatcctggttgtgctgccacaggaactgggattcagtaatgcgttccggacgcgctttcacttcgccgctgaacgccagtttacgttcgacagcgccttcgctttccgccagctctttcagcagcgcaggggcgatggtcagacggtcgcaaccggccagctcaaggatttcgccaacgttacggaagcttgcgcccatcacgacggtttcatagccgtgctgcttgtagtactcgtagatttcgctaacggaaaccacgcccggatcttctgccggcgcgtactctttcttatccgtgttcgctttgtaccagtcgaggatacggccaacgaacggagaaatcaggaagacgcccgcttcggcgcaagcgcgagcctgagcgaaggagaacagcagggtcaggttacagttgatgccttctttttccagctgctcagcggcgcgaatgccctgccaggtggaagccagtttgatcaggatacgatcgttgccgataccggcatcgttatacagtttgatcaggcgtttcgctttcgcgatagaggcgtcggtgtcataggacaaacgggcatcaacttcggtagaaatacggcccgggatcagtttaaggatttcgagaccgatgttcaccgccagtttgtcggaagcatcgataatctgctgcgcgcgatcgctgctctggccgcgagcccaggcaacagcgtcgtcaatcagcttacggtactcagggatctgagccgcgccgaggatcaaagaagggttggtggtggcatcctgaggctgatacagcttcattgccgcgatatctccggtgtcagctacgacagtggtgtactgacgcagagaagtcaatttatccgtcatgatagtgtttctcttaaacagcagttaaggggatgtaaccggtctgccaagatgataacacgccatagggtcagcgcaaccgccgacaatgcaagagcgcagagtgtgataaactcgacatattaattatctgaatgctaaaggattgtcaccggagtggtagcgcttacaccgcgcgccggcatggacaagaggacgtttaatgcctgattttctctcgtttatcaatgaaatactctggggctcggtaatgatttacctgttactgggcgccggtatttggttcacctggcgaacggagtttattcagttccgttatattcgccagtttggcaaaagtcttaaaaaaagccttcgcccgcagcccggcggattaacgtcttttcaggcgctgtgcaccagcctggcggctcgcgtcggcagcggtaatctggcgggcgtggcgttagcgattgccgccggcggcccaggtgccgtgttctggatgtgggtctccgcactactcggcatggccagtagcttcgccgaatgttcgcttgcccaactgtacaaagagcgcgatggcgaaggccagtttcgcggcggcccggcgtggtatatggcccgcggcctcgagatgcgctggatgggcgtggtcttctcaattctgcttctgctggcctatggggtgatttttaataccgtgcaggccaactcggtggcgcacgccatggcctatgccttcgatttgccgatggtcgccgtcggcgccgcgctggctgccgcaacactgttgattatcgtccgcggtctacgcggtgtggcgcgattgatgcagtggtttgtgccgcttatggctctgatatgggtgggcgccagtctgttgattggcctctggcacttcgccgccctgccggcggtttttgaaaccatcttccgctgcgcttttggctggcaggaagcggcggcgggcgcggtgggttataccatcagccaggcgcttaccggcggtttccagcgcgggatgttttccaacgaagcaggcatgggctcaacgccaaatgctgccgctgccgctgcatcatggcctccgcatcccgcggcgcagggcatcgtacagatgattggcgtccttattgataccattgttatctgtaccgccagcgcggtcattatcatgctggcgccgcgcgaaaaccgcgacagtgcggtcagcggtattcaaaccatgcagcacgcgatgggcgatcttattggcagttgggggccgggattggtggctgtcgtgctactgttcttcgctttcagttcgattgtcgccaattatatttatgccgaaaacaatctgatcttcctgcgtctcaataagccgctacatatctggacgctccgggttatcaccgtgttgatggtactgacaggcaccctggtgagtcttccggtggtctggcaactggcggatattattatggcgctaatggcgatcaccaacttaacggcgattttgctgctgtcgccaacggttcggatcctcgccagcgattatctgcgccagcgcaaactcggcgtgcaaccggtcttcgaccccgctcgctatccggaaattcagcaacatctggcgcccggcgcctgggatgagataccgcgtgaatagcgcggtaatcgcagcaatcgatcccaccgtactctttttttgttaaaattcgtcgaaattccctgcaaggactggatatgctgattctgatttcacctgctaaaacgctcgattatcaaagcccgctggcaacgacgcgctatacccagcccgaactcctggagcattctcaacagcttatcggtatcgcccgtaagctgacggcgccgcaaatcggtaagctgatgagcatcagcgataagctagccgatctcaacgccacccgttttcacgactggcatccggactttaccccgcagaatgcccgtcaggcgatactggcgttcaaaggcgacgtttataccggtctgcaggccgaaacctttagcgaagcggatttcgattttgctcagcagcatctgcgcatgctttccggcctttacggcgtcttacgcccgttggatctgatgcagccctaccgtctggagatgggtattaagctggaaaatccgcagggcaaagatttgtatcatttctggggcgatatcatcaccgataagctcaatcagtcgctgcaggcccagggcgacgatatcatcatcaacctggcatccgatgagtattttaaatcggtcaaaccgaaaaaattgcagggacggttgattaagccggtattcctcgatgagaaaaacggtaaattcaaggtgatcagcttctatgccaaaaaagcgcgcggtctgatgagccgctacatcattgaaaaccgtttaactcgtccggagcagctgcaggcgtttaatagcgaaggctatttctttgatggggaagcttcggagaaaggcgaactggtgtttaagcgccacgagcagtaaaaacgacgacacccctgtccggtaagcgacaggggtgttttcagtcttaattagcccatcatcagcttacgcagcgcggcgaaatcagccggcagattatgcgacagcagcggcaggtcggcgcgatcggccagttctttcggcagcggcagcgtctcctgcagaatctcttctacgctctctttgaatttcgccggatgcgcggtaccgaggaataacccgtactcgcccggttgcaattggtcgcgcagcgcgcgataagcaatcgccgcatgcggttcagaggtgtagccgatggacttcagttcacgcatggttgctttggtggtttcatcatcaaccgcggcgtatcccagctcattaagacgccagattttgcggcggaacagttcttccacgcgcggccagttgttcggttggctgacgtccatggcgttagacagggtcgcctgcgtcgccttcggcgcccagttgccatcctgcaggaagcgcggcacggtatcgttggcgttggtagcggcaataaaacgcttaatcggcagccccagcgatttcgccagcaggccggcggtgagatcgccgaagttgccgcttggcaccgacaccaccagctggttacgggcctcctgcggcaactgcgcgaccgcctcgaagtagtagcagatctgcgccagcagacgactgatattaatagagttggcggagttgagaccaagcgcgaccttcagttcttcatcgtcaaacgcctgcttaaccagcgcctgacaggcgtcgaaatcaccgtcaatcgccacggtttcgatgttgccgcccagggtgcagaacagcttctcctgcagcgggctaatcttaccgcgcggatagaggataactaccttgacgttcggcaggccgtagaaggcatgcgctacggccgcgccggtgtcgccggaggtcgcggtcaggatcgtcaccggcttatcgcctgcgatatgcgtcagcatctgggccataaaacggccgccaaaatctttaaacgccagggtcgggccgtggaacagctccaggcagccgacatcatcctgtacttgagtgaccggcgccgggaaggcgaacgccgaagccacgcgggcctgcagttcattctgcgggatctcatcgccaataaaggccgacaggattttcgcgctacgggtcacgaaatcctgctccagcatttcgtcgatttcggtcagattgaattccggcaaatcgtgcggaaagaacagcccctgttgtttgccaagcccttgcgtcacggcctgcgcaaagctgacctgttcgttatgatcttttaagttatacagtttcatcacttatcccactactcgagcgcccgccgtgtccagccggcaaatatgaacgaagccttcctgattttgcagataatgcgcggccagccagtcggcgacgcgctgcgcggtgtccggtttatcgcacaacgcgaacagcgtcgggccggagccggaaataccacaagcctgcgcgccgatttccatcgccgcctgacgcgcttcgctgaagcccggcagcagtttggtgcggtacggttcggcaataacatctttcattaactttgccgccaactgcggctgacggctatagcaggcgtgaataaaacctgccagatggcgaccatgggcgatgcaatcctgacggcgatactgcgccggaagaatcgcgcgcgcttcggcggtagagactttaatgcccggataggccagcacccacaaccattcatcaaaacccgggatctgctggctgatgatgccattttcttcgatcatcagttgcataccgccaagatagcatggcgccacgttatcatagtgaacgctgccggagatgcgcccttccatctcgcccatcaacgccagcatccggttttcattcagcggcttgccgcagtgttcgttcatcgccaccagcgcggcgaccaccgaacaggcgctggagccaaggcccgagccaatcggcatattcttttccagggtcatcgccaccggaaccgttttaccgatctcgcggcaaaaggcttcccagcattgataaacgatattttcctgcggcgccgacggtaatttgccggcaaagcggcctacattacgcaggctaaactccgccgccgcctctaccgagacgttatcacccagcaacgtgccgtcgaccggcgtcaccgcggcccccagcacatcaaacccgacgctcatattggcactggaagccggggcgtatactttgaccatcttaaactcctaacttccatgacagggtacgcagcaggtcggcgaacacgccagccgcggttacgtcgttacccgcgccatagccgcgcagcaccagcggcagcggctgataatagtggctgtaaaacgccagcgcgttctcgccgttcttcaccttatacagcggatcgttaccgtccacttcggcgattttcacccggcagacgccatcttcttcaatattgccaacgtaacgtaagactttaccctcgtcgcgcgctttagcaacccgtgcggcgaattgatcgtcaagcgtcggcaggcgcgccataaagctttcgacatcgccgctggcatcaaaatcggcaggcagcgcaggctcaacgataatatccgagagctccagctcgcgcccggtttcgcgggcaaggatcagcagcttgcgcgccacatccacgccggaaagatcatcgcgcggatccggttcggtatagcccatctcacgcgccagtttagtggcttcggagaggctcatcccttcatccagcttaccaaaaatgaatgaaagcgaaccagacaggatcccggagaagtgcagcagttcatcgccggcattcagcaggttctgcaggttttcaatgaccggaagacccgcgccgacgttggtgtcgtagaggaatttgcgccgcgagctgctggcggcgtggcgtaactggtgatagtaatccagtgaagaggtgttggcctttttattcggcgtcaccacgtggaaaccttcacgcaggaagtcagcgtactggtcggctaccgcctggctggaggtacagtcaacgataaccgggttcagcaggtgatactccttcaccaggcggattaaacggcccagattaaagggttctttcgcttccgcgagttcgccacgccagttttccagattcaaaccatggacgttggtcagcagcgcctgcgaattggcgacgccgcatacgcgcagatcgatatgcttgcccttcaaccagctctgctggcgtttaatctgttcgattaacgcgccgccgacgccgccgacgccaatcacgaagacttcaataacctggtcagtgttaaacagcatctgatgcgtgacgcgcacgccggtagtcgcatcatcattgctgacgactaccgaaattgaacgctcggaagagccctgggcaatcgccacgatattaatattggcgcgcgccagcgctgcgaagaatttcgccgagataccgcgcagcgtacgcatcccatcacctacgacggaaatgattgccaggcgctccatgattgacaacggctccagcagaccttctttcaattcgagataaaattcatcttccatcacccgcttcgcgcgagcgcagtcgctttgcggcacgcagaagctgatgctgtattccgaagaggattgggtaatcagcaccacagagataccggcacgggacatggtggcaaagacgcgcgccgccatgccaaccatgcccttcattcctggcccggaaacgttgaacatcgccatattgttgagattcgagatcccttttaccggcaggccgtcttcatcaaggctggcgccgataagcgttcccggcgcctgcggattaccggtatttttaatcaggcatgggatctggaactgggcgatgggcgcgatggtgcgcgggtgcagcaccttagcgccaaaataggaaagctccatcgcttcctgataagacatggatttcaacaggcgcgcatccggcacctgacgcggatcgcaggtataaacgacatcgacgtcggtccagatttcgcagcagtcggcacgcatacaggcggccagcacggctgcggaatagtcagagccattacgccccagcacaaccagttcacccttttcattgccggcggtaaaaccggccatcagcaccatgtggtctgccgggatttggctggcggcgatacggcgagtggattcagtaatatcgacagtggattcaaggtagtggccgacagccagcagtttttcgaccgggttaatcacgctgactttatgaccgcgcgcttccagtagcgccgccataatagcgatagagagcttttcaccgcgacagatcaacgaggcgttaacaccgtccgggcactgccccagcaggctgataccgtgcaggacgtgtttaatctgcgcaaactcttgatcaacgaaggttttcagctgtgcgagcgggaagcccggctgcatgtcggccagcccctgcagcaggtcggcaaagatacgttcggcatcggcgatattggtcagagcgtcctggccgctgatagttttttcaatcatcgcgaccagatggttagtaattttcgccggggcagacagcacggtcgcaacctgcccctgcctggcattgctctccagaatatcggcaactcgcagaaagcgttctgcatttgccactgatgtaccgccgaacttcaacactcgcatggttcttaccccttgatctcttgtcaaaaaaaaagcccgcactgttcaggtgcgggcttttttctgttgtttcctgtacgcgtcagcccgcaccgttacctgtggtaatggtggtggtgataatggtggtaatcatgccgatgcgattcatggatgttgtgtactctgtatttttatctgtcttgtgtcctgcctatattggttaaagtatctgcctgcttaagtcaacgaatttctaaattggcgacttttcaaccaacaccatcattccgccacagcgccccgatatttccgccgcattaccagcctgttgctattgcaatcagtacacaaaactataaaaaaaacttattgcggtattttattccgggagacttttttcaatatcatgcaacaaacgatgcagcatggcggtgtcgcgctgctgtaacaggccgattcgctgttgtagccagtcggccagtttcatgtcgtcatcgaccccccaaccgtccaagtagtgaaagcgcccgctgacgaagcgcctgcagttgtttttcgtcggtttcaggctgctgaaccgcagtctgctgctgcagtgagctcagctgatagcaatacaccatcaccgattgcccaagattcaaggagggataatcggcgaccatcggcacgccggtaagcacatcggccagcgccagttcatcgttagttaatccggaatcttcacggccaaagaccagcgccgtatgtttcatccattgtgctttttcttccagcagcggtagcaactgctgcggcgtggcgtagtagtgaaaacgcgcgcgactgcgggcggtagtggcgacggtaaagtcgacatcgtgcagggcctgctcaagcgtcgggtaggtttttatattatctaaaatatctcccgaaccatgcgccacccagcgcgcggcgggctgctgatgcgcttcgctatcgacaatccgcaattcgctgaatcccatggttttcatcgctcgcgccgccgcgcccacgttctccgccctggcgggcgccaccaaaataattgataaacgcattgtgcttctctttatcctcttacgcggcgcgactctgcggtctcccccattttacgcggcgaaaatttacaaatttgcaacaaaaatcactaaaaatgggctttcttactcttaaaaaaaactaaactgttcacattggacgccaatacggagtatgttaacagaacgcatttatccatatgtttggcaatgatatttcagttttcatttgcccacaggctttggattcactgcatttattaattcatagttgcaactaattgagctgtgtaagaaatgtgacgataagtcgcaaatcgatgcaatgatttcacaagactgttaacgtgctacaattgaacttgatatatgtcaacgaagcgtagttttattgggtgttcggcctctcttagcctgttatgttgctgttaaaatggttaggatgacagccgtttttgacaccgtcgggtccagagggaaagtacccacgaccaagctaatgatgttgttgacgttgatggaaagtgcatcaagaacgcaattacgtactttagtcatgttacgccggacatgttaatttgtggcatgtaccaggcaggtcagggactttggtacttcctgtttcgatttagttggcaatttaggtagcaaacatgcagaccccgcacattcttatcgttgaagacgagttggtaacacgcaacacgttaaaaagtattttcgaagcagaaggttatgatgtattcgaagcgaccgatggcgcggaaatgcatcagatcctgtctgaaaatgatatcaacctggtgatcatggatatcaacctgccaggtaaaaatggtcttctgctcgcgcgtgaactgcgtgagcaggctgacgtcgcgctgatgttccttaccggccgcgacaacgaagttgataaaattcttggcctcgaaatcggcgccgatgactatatcactaaaccgtttaacccgcgtgaactgactatccgcgcgcgcaacctgctctcccgtaccatgaacctcggtaccgtgagcgaagagcgtcgcagcgttgagagctacaagttcaacggttgggaattggatatcaacagccgttcgttggtgagcccaaacggcgagcagtataagctgccgcgcagtgaattccgcgcgatgctgcacttctgcgaaaacccgggcaaaatccagtcacgcgcagagctgctgaagaaaatgaccggtcgcgagctgaagccgcatgaccgtaccgtggacgtgaccattcgtcgcattcgtaagcatttcgaatccacgccggataccccggaaatcatcgccactattcacggtgaaggttaccgcttctgtggcgatctgcaggaataacttcggttatgccgcagctataatgcaaaaacagcgccttctggcgctgtttttttatctctcttttacttccagatacgtaacgtgtcttcatccttactttgcggtttttgcggattgctttgcggtagtgacaaggcgtaccagtccacgcggcgggtcaggaacatcaacgcgcacagcgccaacagtagaaccccggtgccgagcagcaacgcgctatcctcagaacgcaacagtaaccacatcacgccatccagcagcagtagcactgcaacaaataacagactattacgccaccctttcagtaccgcctgtaaataaacgccgtttatcaccgcgccaatcaggctggcaacgacccaggcaggcgtaaacccaacatgttccgagagcgccagcaacaccaggtagaacatcaccagcgataaccccaccagcagatactgcattggatgcagacggcgatgcgtcaggctctcgaaaacgaagaaggccataaaagttagcgcgattaacaggatggcgtatttagtcgcccggtcggtgagctgatattgatcggcctgcgacatcacgtccacgctgaaggcgggtaaacgcggccattcaatatcggtatcatcgttgaaatagctgcccatattgttggcgaaccagctgctttgccagtgcgcgctataacccgaggcgctcacttcgcgctttgtaggcaggaagttgcccaggaatcccggatgcggccagttactggttagccgcagctcgctgttgcggcccaacggtacgacagagaagtcgccggtaccattaagatcgagggtaaaagcaatctccagcggtttgttgtctgcggttaataccggcatcggcatatgaatgcccataccgccgccgttcaatcccagccccggttcaacgaccagtgccgtaccgttaatgaccggcgcgttgatggcgccgatgccgcgggcatcgctcacgctgagaactaaaaacggctttcctaacgtggtattcgcttttttcagctccgtcagccgcgtaggatcatactgcgccttaatttgcagggtgttatgccagacctgcccactgtaaatgccgacttttctcgactccacattttgcgcgccgctgaccgccagcgattccggtagccagtagtagatccagcgacgctgatattcgacctctttttggttctccattcgggtcagcgtctcggttaccgggatggcgatcagcggcccggccagcttttgtgaaccgctggtgctgtgctctatcgcatccacaacatcgctacgatagtccgcccgctcgacaataagcgctctgaccatcatcagcggcacggacaacagcaaaatacagcccaacaacgtactaattttccagaacaacggtgatttcatcatagccttctcccaatcgtgatgggctcactgtaagggggctatgtgcagtgtgtttgaagttatgtgaagggacggtgaagatgtagcgtcgcgaccacgccgccttcagggcgattgtgcaaactaatatcgccctgatgtagacgcgcgacttcacgaacaaacgccaggccaagaccactgcttttatggccgtcatcccgcggcagcgagtaaaagcgttcaaagatgcgctccagcgcaaaatcaggaattccgctaccgttatccgtgacgctcaaccacgcctcttcattacgcatctctaccgccagggaaatttcaccgccgtacggggtaaagtcaatcgcattgtcgataagattgcccagcgcctgccccagtagttcgctatcgccattcaccgttaccccgctctcctgccagcgtaaggtgatggccttcgccgtcagcgcaatgtcgcggtcttccgccagacgttggaaaagcgcatcaaccgaaaccaactgcggcgttatctccagacgattttccagccgcgcctgctgcagcagtttttccaccagcagttgcatgcgcgtattctgcgcaagaatattggcggtgaaacgcgcggcgatctcgggcggcggcgcctcgctcaggatctccgccgcgccgcgaatggccgccagagggcttttgagttcatgcgtgagatcgtagacatagttttcaatcgcgtttttgccttcaagcttcacgcgcatgctctccagcgcctgcgccagcttgcttagctcgcggctgccgacgttcggtagaggtaacggacgctcggcggtcaccgaatcagcgtaacgaaccagtttgccaattgagaagttaatccaccagacgatcccgccgccgatcagtaaagcgatccccaacaacgcgccgccagcccacaggatccgccgctcgctgcgtttaatcaccggcgtcatggccagattaggtttgccgacgctcaccacgccgatgatacggccgttatccattaccggtgcggcaatgtacatgactgagctattatcatcatcaggatcgctgcgcgtgctgcgcgcgccgtactggccgcgtagggtcagccagacgtcgttccagcgcgaataatcctggcccaccgcctgcccgctggagtcaaacaccacctttccctgagcatccgtcagatagacgcgatactcattgcgcattttcctgataccgctgatattggcgttgatgggctgctgattaagcgactgaaacgcctgcgccaaccgcccttgctgcgggtttgccgaaagcaggtcatcacgagccagcgccgccagtagcgttgcggtatcgttaagcgtgccttccgttgccctacgcacgcccggtttgacttcctgcacaaatattgagagcacaaaccacgcggcaatggcgacaatcaaaaaataacccagcagcaggcgcatcccgatacgcatcaacagcctcccaggctatagcccaaaccgcgatgcgtattaatagggttaacattcggattcaccgcccgcagcttggcgcgcagggtcttgatatgggtatcgacggtgcgatcgatactctcgtaggcatcgctccataccagttccatcagctgctggcgggagaatacgcgaccgggggcgttgattagggttttcagcagcaggaattcgtaacgcgtcagattcaacggttggccaaaccagcttatcgccatcgcctgctcatccagcaggaactcgccaacgcgcaccaccggcgaaggagctgaaaatttctgtagccgacgcagaacagtacgcacccgcgcgcaaacttcgcgcggcgaaaatggtttggcgatgtagtcatcagcgccaatttccagtcccagcagcttatcaacctcttcgctgcgtgcggtcagaaacaatagcggcaatgccggatggcgcgccagcagtcgtcggcatagttcaaagccgctaatatcgggcaaaccaacgtcgaggatcgctaaatccgggatctgatgcagcgccgcatcaagcgctggcaacccgcgtccgaaaacggtcacgtcgaatccttcctgctgcagcatgtaaacaagggtatcggcgatactctgttcatcctcaactaaccaaatccgtggctgttgcattgcgactcccgtttatttattccagggcataattggcacggcgctgatggcattcttcggcgagccgtcgaccactttatccgaataggtcagatagaccagcgcattacgtttagcgtcaaagaagcgaacgacctgcagttttttgaacaccagcgaggtacgtttctggaacacgacatcgccctgacttttgccgtttttgatcttgtccgtcagctcaatcggcccaacctgctgacaggagatggcggcgtctgaggtatcctccgccagccccaacccgcctttaatgccgccggtttttgcccggctgatatagcaggtgacgttctgtacatcgggatcgtcgaaggcttcgaccacgattttgtgatccggccccagccatttaaataccgtatcgacggagccgatttgctcggcgtgcgccagttggcccgccgccagtaagaacaaccctgctactaacttcttgtatttcatattgttaccatttcttaaaattccgctgcgtgataatcacaaacgctgtggaaaaggtttaaagatcacagctttacaaaattactaacgatatccaccagataatcgcatttaaaagcaaaaaaaacactgaatgctaaaacatcaaaaaatgctattatccgctaccttaatataggtacctgagtttaaaggatggggacattttatggatcaagctgggattattcgcgatctcctgagctggctggaaggtcacctggatcagcccctctcgttggataatgtggcggcgaaggcaggttattccaagtggcatttgcaacgtatgtttaaagacgtcacgggtcaagctatcggtgcctatattcgcgcacgtcgtctatcaaaatccgccgttgcgctacgcctgaccgcacgtccgatcctcgacatcgcgctacagtaccgcttcgattctcagcagacgtttacccgcgcctttaaaaaacagtttaacctgacccccgcgctctatcgccgttctgcggactggagctcatttgggatgcgtccaccgctgcgcctcggtgaatttaccatgccgaagcatgagtttgtcaccctgaacaccacgcaactggtcggcgtgacccaaagctatacctgtaagctggaagagatttctgaattccgtaaccagatgcgcgttcagttctggcgcgaattcctcggcaacgcgcccagcattccgccgacgctgtacggcctgcatgaaccgcgtccaagcctggaaaaagatgacgagcaggaggtcttctacaccaccgcactgacgccagagctggcgaacggacacctgcataattcccatccggtgattctggaaggcggcgagtacgtgatgttcacctacgaagggttaggtactgggctgcaggagtttattctgacggtgtacggcacctgtatgccgatgctcaacctcacccgccgcaagggtctggatattgaacgtttctatccggaagatgataaccggaaccaggccacgccaattcagctgcgctgcgagtacctgattccgattcgtcgttaacgctgcagttcgtccatcgcgggggcatcgagatgcgagacgtcccccgcggtctccaccacccatcctgacgccagccacgggctctgctggtaatcaacgcgtgaaatcgaacagttgcgcaggcgcaaacgacgctccgcataagcaggcagtccgaggatcgtactcaccagacagcccagcgccatcccatgactcaccagcagcggccggctccctggcggtaactccagacaagacgatagcgccgcgcgcatacgctcgctcagctcctgcatggattcgccctgcggaatgcggccatccggcgtaccgttgaccagctgacggcgccagccctcctcttcttcgctaagcgagtcgatatggcgcttctccagcacccccatatccagctcgcgcaggcgcggatcggtaacgacgccgcaaccgcaggcttcggcgataatttctgccgtgcggcgggtacgaccgaggtcgctggcgataatatgggtaatccccagcgttctggcgcgctcgccaacctgccatgcctggcgctcaccgtgagcggtcagcggactatcggactggccttgaatacgtcgctcggcgttccactgcgtttcaccgtggcgaacaaggtatacctgtaacatgcttattttccgttctgaacccttcatcattcaacgagcagcgcgatcggctgccgccagagtgatttagagtatactgcgatgacgttaattaattctgagttgttttgattatgcaccatgttgtctcagctaccactaatcccgccaaaattcaggcaattctgcaggcttttaacgagatcttcggcgaaggatcctgccatattgagtccgtcgccgtcgagagcggcgtgccggaacaacccttcggcagcgaggaaacgcgggctggcgcacgaaatcgcgtcgctaatgcccggctcgcacagccggaagccgatttttgggtggcgatcgaagccgggatcgacgaaggcagcaccttcagttgggtagtgattgagagccggcagcagcgtggcgaagcgcgctcggcaaccctgccgctgccggaggcgatccttgcgcaggttcgcgccggagaagcgctggggccggtcatgtcgcaacataccgggatcgaccagattggccgcaaagagggcgctatcggcgtctttaccgcgggtaagctgacgcgcagcagcgtctaccatcaggcggtagtgctggcgctcagcccatttcataacgctatttatcgttaagcagcgtctgttccagccactggcgtagctctaccggagccgatttcaggctatttgagccgcgagtaatcgtggcaataccggcgccgagttcgtttttcagctcgcgctggctcatctcgccgcgcagcagctcttcaataatacgcacccgggtgcccagcgcttcgcgctcgtcgggcgtcagcatcagctgtagtaacggcaggtgaagatcttcggcgtaggcctgctgcagtagcgccacaaagcgcagccactcctgatgacgttgttcggccactgccgctgaatagggagattgttgggtcatgttacgtcgccatgttgagacgggcagccaggctgcccgtcgaatgtactcatcaacgagtacaaagaataacatacttacggacgatcagtaacgctgtcgccattcggcgtcgctcagcaagttatcctgcttgcccataaagtagcggtaataggcatcgtaagagaggacgttttttacgtacccgcgggtttccgagaacggaatactctcgataaatgccaccgcatcgatgcgcccggcgctattgccctgccaggtgcgtacgcgtcctggcccggcgttataggcggcggaagcgtaaatgcggttattgccgaactgctggtagacgtactgcaggtagctggtaccaatgttgatattggttgccggatccagcagctgagacgggccgctataaccagggatgctgaacatgctgacggtatgcgtcgcggtgcccggcataatctgcatcaagccactggcgccgaccggtgaacgcactttcgggttccaggcgctctcctgacgcgcaatcgccatcgcgtagctctgcggaatatctttgccgctaatgtaacgcgcgaacagatcgttgtacgccagcgggaagcgctcttccagttgatcccacaatttacccgcgatcgtcgcctgcacgctgagatcccaccagtgttgatcaaacgcgtaacgcgccagctgcgcctgttgcgatttggtccggctgctcaccaggttcgcccattcgctgcgcgcggtgttgtccatgttccagtacatcagctcgcgaacgcgcgccatctcagggccagaggccagcgccgggtcgatagtgccggaggctttatcaatgcggaaggtgtactcttcgcccagacgttgagcagcaaccatcggatagaagccgcgctgctgcatcagcgaatgcaggatcgtcttcgcttcgtcatcgcgcccgcgctccagcagcaaatccgcctgccagtagcgccactcgtctttttctttcgcctccatcggcagacgcgccagccaggtgttcagcccatgacgatcgccgttgccgagcgccatacgtacccggcgttccaccagcgaggttgattgcgaacgcattatggcgtcatcgcgccactccgcctgcgcttcggtcacatcggtgcccatcaggcgccaggcgacaatatcgcgcagctcctgggtttgatcctcattcaactgctgcgcctgcaccagcgacgggatcatcagacgagcgttttctacatcctgacgcgcgacgctggcaaaagcgaccgccgccatctggcgggtaaagtcagtggccccggtggtgcgggcaaaggtcatcacgctattgggatcgttagctaacgccaccactgccgaagcgatgctctgatagtttgacggcatctgttgagcaagcacgcggaccagactggtattgcctgccttcatcgccagacgaattcgttcgagataggccagcggatcctgctgcccggaatcgcgccacgcgctgaacagcggatcgcaggcatttggctggctcttgccggttagccacagctctttcgccccgctccacgcttcctgcgattggccgacgctgagtttggcgtagtagtagttacactgcgcttcggttgtcgccggtttatccgggctgaacgccagtaagccgcgccagtcggtgcgccgcgccagctcattaacaaagcgtgatttcagcgaacgcgccgcaggtagggtcgggttcgccgcaatgaaattagtgaccaccagcggcggctggttcatcaggtcatcggtaatttgtcgatattgcaggtagggatacagcggatagctgctgagcgtgggcatcaactggttgacgacatccatctggcggttgtcccacgcctgtttaatttgagcatagcggctgcgctgttcatccagtgaatccgcatgcgccagctggcttagcgtcagcagactcacgccggcagccagaagacgccatgccgtagttttggctttttccacaagctcttcctctagtttggtgcatcaccgcggcatcgtgccgcttcaaaaaattcaggtattgcttagttatgctaatcagacaactgaaaacatgccatgtcctgaacatttttttacgcttctgtgaatcctgtcgcctcgctgggattaccgcgcgaaaaaggctacacttcgcctttgaactatctatcagaatagaaagaggcgaagtccaacgtggctcaattcgtttataccatgcatcgtgtcggcaaagtggttccgccgaaacgtcatattttgaaaaatatctccctcagtttcttccctggcgcgaaaatcggtgttctcggtctgaacggcgccggtaaatctaccctgctgcgcatcatggccggtatcgacaccgagatcgaaggtgaagcgcgcccgcagcccggtatcaaaatcggctacctgccgcaggagccgcagctgaatccggagcacaccgtgcgcgaatccgttgaagaagcggtcgccgaagtggttaacgcgctgaaaggcctggacgaagtttatgccaaatacgccgagccggatgccgacttcgataagcttgccgcgcaacagggcaagttcgaagagatcatccaggcgcacgacggccataacctgaacgtacagctggagcgtgcggccgatgccctgcgcctgccggactgggatgcgaagatcgctaatctttctggtggtgaacgccgccgcgtcgcgctgtgccgtctgctgctggaaaaaccagacatgctgctgctcgacgaaccgaccaaccacctcgacgccgaatccgtcgcctggctggaacgcttcctgcacgatttcgaaggcaccgtggtggcgattacccacgaccgttacttcctcgataacgtcgccggttggatcctcgaacttgaccgcggcgaaggtattccgtgggaaggcaactactcctcctggctggagcagaaagatcaacgtctggcgcaagaagcttctcaggaagccgcacgccgcaaatctatcgagaaagaactcgagtgggttcgccagggcgcgaaaggccgtcagtctaagggcaaagcccgtctggcgcgctttgaagagcttaacaacgtcgaataccagaaacgtaacgagaccaacgaactgttcattccgccaggagcgcgtctgggcgataaagttctggaagtcagcaatctgcgcaaatcttacggcgaccgcgtactgattgacgatctgagcttctccgtaccgaaaggcgctatcgttggtatcatcggtccgaacggcgcgggtaaatccaccctgttccgcatgatgtccggccaggaacagcctgattccggcaccatcacgctgggtgaaaccgttaaactggcttccgtcgatcagttccgcgacgcgatggacaacagcaaaaccgtttgggaagaagtgtccggcggactggatatcatgaagatcggcaacaccgagatgccaagccgcgcctacgttggccgctttaacttcaaaggcgtcgaccagggcaaacgcgttggcgaactgtccggtggtgagcgtggtcgtctgcacctggcgaagctgttgcaggtcggcggtaacgtcctgctgctcgatgaaccaaccaacgacctggatatcgaaaccctgcgcgcgctggaaaacgccctgctggagttcccgggttgcgccatggttatctcgcacgaccgctggttccttgaccgtatcgcgacccacattctggattaccaggatgaaggtaaagttgagttcttcgaaggtaactttaccgagtacgaagagtacaagaaacgcaccctcggcgccgatgcactggaaccgaagcgtatcaagtacaaacgcattgccaagtaatctgtaagtgccggatggcgctacgcttatccggcctaccaggcgtgtagcacttgtaggccggataaggcgttcacgccgccatccggcaaaaagcctacccctgctcgcccatcaactgcttcaccagctcaacgcagcgcaggaaccgggcatcgtaatccgactcttccacgtggacaaattcgatctcgttttctttcagcagcgacaccagcagcgtctgaaactctttgcgatctaccgaactgccgaggctacgcagcccatcggctacccacggcgtgttgttttccagcaggatcaccagatcaaagcgatattcatcgattaacgcctgcacgaacggatgttcgcggccttcgtacttcaggcagaaggcctgagtgctgacgaagtcggtatcgataaacgccaccttattggcgtatttcaccgcgaaatcaatgtactgtgcgtgccccagcgcgattttatcgtaatcggaatactgcaacgccatttcatcgccgccgaggtgtgagaagacgtaatcgcggccatactcccaggcgctggtagtattgaagatattggcgagcttattcaccagcgtagatttaccgctcgactcgccgcctaggatcgccaccgtacgcacaaagaacggttttacctcagtcggaatatattcccaatagcggaacgggttttcgcggatctggccgccgctgatactcatgaaggttcgcttcggatcgataagcacggtttcgatccccagatgctccagatactgcggcgcatcggcctcttctgaggtataaatccagtttggctcgattcccttttcactcatgaaggcgcggatcccacggctccagacatcccagccgtgcgggtacggctccatcccctcttcattgaaggcatggatgcgaatgtttttttgatatttaaaggtttgcagcagccagcgcagacgatcgggaaccgtcggctgttgcgacatggcgctctcttcgaacaactcgcggtcacgagtgtcgtcatagcccatgatgatatgaagctcatcgacctggctacaggcgcgctgaatcaggtaaatatgcccggtatgcagcggataaaatttaccaaaaaccaccccgacgcttttttgtttgcgcgggaattcaaggccgagaaagcggtgtaacgcttcgagcttctgggcgctcgggcttttgattttcgcgtttaatagctgactgagataacctttggtcatcccgctggcttccgccacctgctgcagcgtacaacccttttgcttaatggcgtttttcagatagtcgaatgacgacatagtttatgcgtgcctcctgcaaactcgggtttgctacccgtcataccctgaagtatgacgggtatcattataagtcgtcaaaaacgctcagcgcatcggccagttttttcacgccaaagatttgcatcccttccggcgcttttttgggcacattggccgctggaacaatggcgcgacggaacccatgcttcgccgcctcggaaatgcgctcctggccgcttggcaccggacgaatttcaccggctaatccgacttcgccaaaaaccaccagatcctgcggcaacggacgatcgcgcaggctcgagaccatcgccagcagcagcgccaggtcggcgctggtttcagtgactttgaccccgccaaccacgttgacgaagacgtcctgatcggccatctgcaggccgccatggcggtgcagcaccgccaacaggatcgccagacggttctgttccaggcctaccgctacgcgacgcggattagacatcatcgagtgatcgaccagcgcctgaatctcaaccagcagcgggcgggtgccttcccataccaccatgaccgagctgccggaggtgacttcatcgccgcggctgaggaagatggcggaggggttgctgacttcgcgcaggccctgctcggtcatcgcgaagacgccgagttcattgaccgcgccaaagcggtttttatggctgcgcaacgtgcggaaacgggaatcggcatcgccgtccagcagcaccgagcagtcaatacagtgttccagtactttcggaccggccagcgagccatctttggtgacgtggccgaccatcacaatcgccacgccgcgagttttggcaaagcgcgtcaaataggccgcggtttcacgtacctgggccacgctccccggcgacgactggacatcagccatatgcatcacctggatggagtcgatgaccatcagttgcggcttttcttcatcggcaatctggcaaatttgctcgatgctggtctccgagagcatattcagattcgccgtcggcagcccgagacgatgcgcgcgcatcgctacctgctgcagggattcttccccggtgacgtacagcgttttcatcccttcggccagcttacagagggtttgcagcagcagcgtcgatttcccggcgccggggttaccgccgatcagaatggcgctgcccggcacgacgccgccgccgagtacgcggtcgaactctttaaatccggtggagaaacgcggcagcgcctccaggcttatctccgacagcttctgtactttcgacacgccggcattcccggcgtagcctgacagacgctcgtttctcgccacctgcggcgaggcggcgatgcgcatctcggtgatggtgttccaggcatggcaggcgctgcactgcccctgccagcgcggataatccgcaccacattcattacagacaaatgcgcgttttggagctttcgccacgttaacctcttacttttgattcatgctgccggagagaatacagaatacccccatcaggtcagcgtggcggatggtgacttccgcctgttcattgacttttggtttcgcatgataggcaatgccgagacctgccgccttgatcatcggcagatcgttggcgccatcgccaatcgccacggtttgcgccgacggaatttcatatttttccgccagtttacgcagagtattggctttatatttggcgtcgacgatgtcgccgatcacgttgccggtgagcttgccgtccataatttccagctcgttggcgaataccgcgtcgagatgcagcttatcgcgcagatattcggcaaagaaggtaaagccgccggaggcgatggccaccttccagcccaacgtttccagcttcagcaccagttgggtcagccccggcatcagcggcagcgcttcccgcacctgcagcagaatgttcgcgtcggcgtctttcagggtggcgacgcgctggcgcaggctggcggtgaagtcgagctcgccgcgcatcgcgcgttcggtcacttccgagaccaactcgccggtgccggcaagcttagcaatttcatcgatacattcgatctgaatcgccgtggagtccatatccatcaccaacaggcccggcgtgcgcagatgcgggattttgcccagcggcgcgacgtccagcccggcctcatgggccaggcgcgtggcgcgctgcgtcagcgaccccgccaggcgaatcacctgatagtcttccacgacccaggaagagacaatgaccagcgccgcgccgagctcgcgctgccacgccgtcagccgacgtttatcgagaccgcgaccatacagcagccagccgctgcgcccggcgtgataatccagcggcatgacctcgtcgccgctcagggaaagcggcaacccaggccacaaggaaacatcttcgggcaggtcgcaccaggtcaaactgttaggcattacggctccacatctcttcattcaggcgaggaaaataacgcatgaggctaccttgtaaccagcgcttctggcaacattaagctgcaaattttcaaaggtggaatatggtacgagcaaaactgaaattccgactgcatcgcgccgtcattgttctgatctgtctcgcgcttctcgtcgcgctgatgcagggcgcctcgtggttcagtcagaatagccaaaagcagcgtaatccgcagttggaagagctggcgcgaacgctggcgcagcaggttacgctgaacctggcgccgctgatgcgcagcgaaacgcccgacgaaaagcgcattacccgcctgctggaacagctgacggacaaaagccgggtgctcgatgccggggtatatgatgaacaaggcgatttggtggcccgctccggcgaaagcgtcgatgtgcgcgaccgcctggcgctggatggcaaaaaagctggcggctactttaaccagcaaatcgtcgagccgatcctcggcaaaaacggtccggtcggctatctgcgcctgacgctggatacccacacgttggccaccgaggcgaaacaggtggataataccaccaatatcttacgcctgatgctgctgttgtcgctggccatcggcgtggtgctgacccgtacgttgctgcagggcaaacgtacccgctggcagcagtcgcccttcctgctcaccgccaataagcccgtccaggacgaagataaagattaatcagaaaaggatatcctatgccgacgctccgcctgttgctctccgattcctacgacccctggtttaacctcgcggtcgaggagtgtattttccgccagatgccggccacccaacgggtgctgtttctgtggcgcaatgccgacaccgtggtgattggccgcgcgcagaacccgtggaaggagtgcaatacccggcgcatggaagaggaccacgtccggctggcccggcgcagcagcggcggcggcgcggtattccacgacctcggcaatacctgctttacctttatggcgggcaaaccggaatacgacaaaaccgtttctaccgctatcgtgctggcggcattgaattcgcttggcgtgaccgccgaggcttccgggcgcaacgatctggtcgtgaaaaccgacaatggcgaccgcaaggtttccggatccgcctatcgcgaaacgatggaccgcggttttcatcacggcaccctgctgctaaacgccgacttaagccgtctcgccaactatcttaatccggacaaaaaaaagctgcaggccaagggcattacctcggtacgcgggcgcgtagcgaacctggttgaactcctgccgggcattacccatcagcagatttgcgaagccattcaggaggcattcttcagccattacggcgagcgggtagaggcggaagtcatttcgccggacaacacgccggatctgccgaattttgccgagaccttcgcccgccagagcagctgggagtggaacttcggccaggcgcccgctttctcccacctgctggatgagcgctttcgctggggcggcgtcgagctgcattttgacgtcgagaagggccatatcacccgcgcccaggcttttaccgatagcctgaacccggcgccgctcgaggcgttggcggcacgattagtcggttgtcagtatcgggcggaaatattacagcagcagtgtgaggcgctgctcgccgattaccctgagcaggaagcggaactgaaagaactgtcggcgtggctggccggcgcggtgcgctaataaaaaagcccgctgcgcttagcgggcctggaaaccgtaggccgggtcaggcgaagccgccacccggcacaacaggtcttactctttatcacccagcagtacggattccagcgcgattttgatcatatcgttgaaggtggtctgacgctcagcggcagtggtctgctcgtgagtgcggatatgatcggaaacggtgcagatggtcagcgctttcgcaccgaactcagccgctacgccataaatgccggccgcttccatttccacgcccaaaatgccgtatttttccatcacgtcgaacatggacgggtccggcgtatagaacaggtcagcggagaagatgttgccaacgcgcgcgtcaacgcccagcgccttcgccgcgtctaccgcgttacgcaccatgccgaaatcggcaatcgccgcgaagtcgtggtctttgaaacgcagacggttgactttagagtcggtgcacgcgcccatgccgataaccacatcacgcagtttgacatcttcacgtaccgcaccgcaggagccgacgcggatgattttcttcacgccgaaatcggtgatcagctctttagtgtagatagagcaggatgggatccccataccgtggcccatcacggagattttgcggcctttgtaggtaccggtgaagcccagcatgccgcgcacgttgttcacttcacgcacgtcttcgaggaaggtttctgcaatgtgcttcgcgcgcagcgggtcgcccggcatcaaaactacgtcagcaaaatcgcccatttctgcgttaatgtgtggggtggccatcgttttatccttatataaattgttcgggcctgatggcggctacgccttatcaggcctacaaaacgtattcaaataccctaaggatttcgcgttgtaggaaggcgacgaattcgtgaatccccgggagcatagattaactatgtgaccggggtgagcgaatgaagtcaacgcatctacagcgcgaaagacaacgggtatcacagcatgtttttaccgtattccattggcgacgtaccaaagtatgtcgccagcgtctggccgatatcggcgaaagtttcgcggtggcctaacgaacccggcttcactttcgggccgtacaccagcaccggaatgtgttcgcgggtgtggtcggtaccggtccaggtcgggtcgcagccgtggtcggcggtgaggatcagaatgtcgtcttccccaaccagctccatcagctccggcagacgacggtcgaacagctccagacccgccgcgtagccagcgacgtcgcgacggtggccccaggaggagtcaaaatcgacgaagttagtgaagacgatagtctcgtcgcccgcttccttcatctctttgatggtcgcgtcgaacaacgcgtccagcccggtggctttcactttcttagtgatgccgcagttggcgtagatgtcggcgattttacccacggaaaccacgtggccgtttttctcgtcgaccagcttctgcagcacggtcggcgccggcggctcgaccgccagatcgtgacggttaccggtacgctggaagttaccggctttgtcgccaacaaacggacgagcaatcacgcggccaatgttatagccgccttcggtcagctcttcacgggcgatttcgcacagctcatacagcttgtcgaggccgaaagtctcttcgtgacaggcgatctggaacaccgagtcagcagaggtatagaaaatcggtttcccggttttcatatgctcttcacccagttggtccagaatcacggtaccggaagagtggcaattgccgaggtagcccggcaggttcgcgcgcttaaccagtttatccagcagttcctgcgggaagctgttctcgtggtcgctgaagtagccccagtcaaacagcaccggcacgccggcgatttcccagtggccagacggcgtatctttaccagaagagagttcatgcgcccaggcataggcaccaacgacttcggcattaccgtccataccggcggcaattttaccggtagaaccttcatgcgctttcaccagacccagacgggtcaggttaggtaaattcaacgggcctttacgaccattgtcagcttcacctttggcgcaggcttccgcaatgtggcccagagtatcggcgccaacatcgccaaagcggtcagcgtcttccgttgcgccaatcccaaaggagtccagcaccataataaatgcacgtttcatcttgttctccatacatcatgcgctgcaaaaaagcgatcagatcagtatatcgctacttggtgatacggcgatagaccgtcggtgtaatttctggggcgtgggcgtccaattttattgccgctttcacggctttggccgcttcctgccagctcgattcatctttcgcatgaatcaccgccagcggacgttcgccatcaactttatcgccaaggcgcgccatatcggtaaagccaacgctgtagtcaatagtatcggaagcctggcgacgaccgccgcccatcgacaccaccgccatccccagcgcgcgggtatccatttcagagacaaatccggcgccttcagcatagaccgctttgctcagcattgccgtcggcaggtatttcgcatagttttcgacaaagtcgctcggccccttctgcgccgccaccatgcggccaaagacttccgccgctttaccgttatccagcaccgcctgcaatttcgcgcgcgcctcggcgtcatccgccgccagcttgccggaaatcagcatttccacgcacagcgccatggtgacgtcgtacaggcgcgggttgcggtattcgccggtcaggaactgtaccgcttcgcgaacttcaacggcgttacccgcgctggaggccagcacctggttcatatccgttaacagtgcggtcgtgcgcacgccggcgccgttagagacgccaacgatcgcttcggcaagcgcttctgaaagctcataagtcggcataaaggcgccgctgccgactttaacgtccatcaccagcgcgtccagaccttccgccagtttcttggccagaatagacgcggtaatcagcgggatggaatccaccgtcgcggtaatatcgcgggtggcatagaaacgtttgtcagccggcgcgagcgagctggtctgcccgataatcgccacgccgacatctttaataatttcgcggaaacgcgcgtcgtccgggaaaatatcaaaacccgggatcgcttccagtttatcaagcgtaccgccggtatggccgagaccacgcccggagatcatcggtacgtaaccgccgcaggcggcaaccattggccccagcatcagcgaggtgacgtcacccacgccgccggtcgagtgtttatcgacgatcgggccgttgaggttaaggcttttccagtcgagaacggttcctgaatcccgcatcgccatggtcagcgagacacgttccggcatagacatatcatggaagaagatggtcatcgccagcgcggcgatctgtccttcagagatagtattatcgcggataccgttgatgaaaaagcgaatttcttcatcgcttaatacatgaccatcacgttttttacgaataatttcttgtgcgagaaacacggtaacctcccaaatagtataaagtgccggatggcggcgcgagcgccttatccggcctacaggcatccattcgtaggccggataagcgcagcaccatccggcgtatcaagggattagtagctgctggcgctcttaccgtcgccgtgacccagggctttcagcaggctagccagcaggctggatgcgccgaaacggtagtggcgggaatcggcccagtcggcgccgaacagttcatcagcaatcgccaggaactgctgcgcgtcttccgcgctacgcacgccgccggcaggtttgaagccaacggtcttctcaacgcccatatcgcggatcacttccatcatgatgcgcgcgctttccggcgtcgcattcaccggcactttaccggtagaagttttgatgaaatccgcgcccgctttaatagagatttcagacgccttacgaatcagcgcttcttctttcagttcgccggtttcgatgatcactttcagcagcacattcgccgccgcacaggcttctttacaagctttcaccagatcaaaacccacctgctcgttacccgcgattagcgcgcggtacgggaaaaccacatccacttcatccgcgccataagcgattgccgcgcgggtttccgccagcgcgatatcgatatcgtcattaccatgcgggaagttagtcaccgtcgcgatgcggatatccggcgttccttgttcgttcagcgtcttacgggcaatcgggataaaacgcgggtagatgcagaccgcagcggtattgcccaccggcgttttcgcctgatgacacagagcgatcaccttctcattggtgtcgtcatcgttcagggtggtcagatccatcagtttcaacgcgcgcaggctgcttgctttcaaatcagtcatttcatactccgacggcgtattgccggttcaatagtttgttcaccttgcgagcctgttactattgtaacaaccgctcgccattacacttcgacattcatcacagttaatgaaaactaattactaatttgcattactgtaacgtgataaaaatcacaattaaccagcaattcccgccagcctcaccgtcatctcctgtttaagcataatcggcaaaccgaagttcatggtgatgttattattctaacatatcaaaacgagttatctcgacgtcatggcgcacaaattgtgcaaatcctggccataaatatactttctgattgaaacttaatgaattttatatttataaaaaatgatgggattgtcacacccgaccagagccggggacgacgttgtccagtatgtgggtcgttagagggttagcgcggtaaagaggtttttggtattcgccagtagtgccgcttcaatttcctgcgccggttccgcgcgcagttcgcagagcgagtcaaagacgcgggccgcctgttccgggcggttcggctgtccctgaaaaccattcagcggcatatccggagcatcggtttccagcagcagcgaagaaagcggcagacgcgccataacatcgcgagttttgctggcgcggggataggtaatggtaccgccaacgccaatcttatagcccagttgtacaaaacgttccgcctgctgcaggctgccggcaaaaccatgcaccaccccggcgcgcggcaggttatgtttttttagcaacatcgccagcttatcgtgggtgcggcgcgaatgcaggatcaccggcaaatcgtaacgctttgccagccgcaattgcgcttccagcagcgcctgttggcgatcgtattgcggatcgtcgcggtagagatcgaggccaatctccccgacggccacgagtttcggatgacgctgtgcaagatagctttccagttgcgctaacccgcggtcatcatgctgctcgataacaatgggatgcatccctaacgcggcatacagcggctcgtgttgctccgccagcgccagcacgcgagcaaagcgcgcggcggatatcgacggcacgattatgcgcccaacgccggcctgcgacgcccgtgcgatactcgccggctcatcctctgtaaatgggggaaaatcgaaatgacagtgggtatcaataaagcgtaacgtcacgccagatcctcgttattaaagctggggtcattagcctgcggcgcggtgataatcgcctgttgcggcgtttcgttagctaccggcagcggcggcaccaccaccggcgtcggcattgccacacgcggcgcatgacgtaacagcggcggttgctcggtcagcagtttccctaccgtagcgaggaagtagcggccgcactggcgtccggttttataatcttccagcagcgccggcagacggctgccaagcgccatactgcgcagtggccgctgcggatagatttcgaatatccgcagtttacccggcggcttttcaataaactgctgcgtcgcacgataggtggtttcgtggtgctgtaccaggttcacaaaaggctgcaaactgctttcccccagccagcgctccatccgtttaaaccactgcggagtgtagaacatctgcgaagggacggtacggataaccacaatagtctgcgcgccgcggcgcgccgcctcctgcacagggatcgcgtcgctgacgccgccatcgaggtagttcacgccatccagcaggacaccgctacggtaaaaacctggaatggcgctggaggcacggatcagatcaagccaggtctggcgggtaggggaaaaatagtttgccgtgtagtcgtcaccgcggcaggcgcacatccacagctctttacccagcgcgaactgctcctcggcatagttcatcgccagcggcatttgttgtgcagtggaatcgaccagccaatcgagatcgataagattgccgccgcgtacgaagcgcatcgggtcaaaaaattgccgcgaggtggtgtaacgcgtaatgactttacgggcgtaaccctgctgattacagatataagcggagatgttttgcgcgccagcggaagtgccgagcatcaggtcgaaagggttaaatccggcgcgcatgaattcgtccagaaccccggctgtgaaaatacctctctgaccaccgccttcgcacaccagagccaatttgcctggacggaagggttttaccgctaacggggcgatattgcccaacgtcacgggaatgcgctgccccaccctgctttcctgtttgtttattttctgtcattaaagtaacgtaaattgtcgtcctctgaaaccgcaaaagccagtcacattgactggctttatgtaagacgttatgtcatcactgcgcggttattgattcacgcctttcggcacatcgcctctagggtcgttttcgcccggtaaacaggctgaccaggaaaatgataataccgacaacaaagacgattttagccgcccacgccgcggtacccgccagaccaccaaaacccaatgcggcggcaattaacgcgatgatcagaaaaataatgccccatctaaacatactgttctccttaccatatgattaacggtcgcttttctgcgcgctcaggccgcgcatacatcaaccctgcgtacaactcgctcagcggtctcgccgctggcgaatatcttttaataaatacccttactgcactttaagatcgtttttcacgctcttaacaccggtaaccgctttggcaatgtctgccgcgcgatcgacctgtttgctcgattccagggttccggagagatgaacgaccccgtcactggtttccaccgtcaccttacgcgacggaacgatatcgtccgcgagcagtttggctttgacttcgctggtgattgcggtgtcgccggcatagcccttcaggcttgccgatttttcacccgccacggtcagcttatcgcttaccgaactcaccccttcgacgcctttcgccgcgctgacggcctgtgatttttgctcagcgctctccaccgttccgcttaaggtcaccactttgttttccgttttcaccgagatatcggtgctacggatccttttgtcatcgatcagcgccgctttgacacgggcggtgatcgtgctgtcatccataaaatcgccaaccttgttgattgacttatcgacgctttctccggcgctggtcgcggcggccttcgcgctatcggttgcggtggtttccgcataggtcgaggcgcttatcaacgctgagcctaagaagagaggcagcaatagcctggcgctctttagtctggtcattggtatgccctcacgatgtctgctttggtaaaacacatggctatttattcagccaggtttctgaaaagtgcttaataaatatagtagatgagcggagatgcggcggagggtttgaataaaaaagctacgattcgcgcagatttaagaactttctatggtaaggagggagacgggcaaaacaggctggagcgcagcgtcgccgcgctccagagagatattagtgttcgcgggttttgcggaacaccacgtcagggtaacgctcttgcgtcaggttcaggttcaccatcgtcggggcgatataggtcagattatcgccaccatccagcgccagctgaacttcgttcttacgcttaaactcttcgaatttcttcacgtctgtcgattcaacccaacgcgcggtggccacgttgacagattcgtaaatcgcttcaacgttgtattcgcttttcagacgcgctactaccacgtcaaactgcagcacgcccgacggcgccaacgatcagatcgttattagcgatagggcggaagacctgtaccgcgccctcttcagagagctgtaccagccctttcagcagctgtttctgcttcagcggatctttcaggcgaatacgacggaacagttccggcgcgaagttcggaataccggtgaacttcatcatttcgccctgggtaaaggtgtcgccaatttgaatggtgccgtggttatgcagaccgataatatcgccagggtaggcttcttcaacgtgcgagcgatcgcccgccataaaggtcagcgcgtcggaaatcaccacgtctttgccgatacgcacctgacgcagcttcatgcctttctcgtatttgccggaaaccacgcgcataaaggccacgcggtcgcggtgtttcgggtccatgttggcctgaatcttaaacacgaagccggtgaatttctcttctgcagccgtcacttcacgggtatcagtgttacgcggcatcggcgccggcgcccactccaccagaccatccagcatatgatccacgccgaagttgcctaatgcggtcccgaagaacaccggagtaatttcgcccgccaggaacagttctttatcgaactcgttcgaagcgccctgcaccagttccagttcatcgcgcagctgctgcgccagatcgtcgcccaccgcggcatcgagttcagggttattcaaccccttaaccacgcgcacttcctgaatagtgtgccctttaccggtctgatagaggtaagtttcatctttataaagatgataaacccctttaaacagcttgccgcagccgataggccaggtaatcggcgcgcagccgattttcagctcattttcgacttcatccagcaattccatcggatcgcggatatcacggtcgagtttgttcataaaggtgaggatcggcgtatcgcgcagacgggtaacttccatcagcttgcgggtacgatcttcgacgcctttcgccgcatcgataaccatcagacagcagtcaaccgccgtcagggtacggtaagtatcttcggagaagtcttcgtgccccggggtatccagcaggttaaccaggctgtcatggtacgggaactgcatcaccgaggtggtaatcgagatcccacgctgcttttccatttccatccagtcggatttagcatgctggctggaaccacggcccttcacggtacctgcggtctgaatcgcctgtccgaacagcagcactttttccgtgatggtggtcttaccggcatccgggtgagaaataatggcaaaagtgcggcgtttagccacctcttgcagataaggagacaacgtcataattcaatcttctaagtaaacgcggcaatgggccgcgcatgtggaatacgaaaaattgcggctattttacccatcaatgggggggaggcaattagtgtttacacaggagttgctccagttcgcttaaagaggtcaccgtccagtctggctgcaggtctgccggcagcgtttgctggtgcgcattcaaccaacaggtggcaagcccggcattgacgccgccgcggatatccgactcggcggtatcgccaaccatcaataccctgtcgcgcgacggattacccgcttgcgccagcgcgtaatcgaagatacgcgcatccggcttcgcgacgccgacttcctcagaaataatcagcaaatcaaagtgatctcgcaggcctgttcgttccagtcgagtctgctgcaacgaggtaaaaccgttggtgatgatgcccatttttaccttgccctgcagcgcattcagcagcgatacggcgcccggcagcggcgcgcagatttccgccatcgcattcatgaaagcgtcgttcagttcgcccggagggacgttcaaacgttccgcccagctatcaaaacgctgatgctgtaattgtagcgaggtgatggcgccgttttgataatccacccacagcggcttattaacggcctgatagtcctgaaaatctttggcggtaaatgtcacgctatagtcgagaaacatccgctgtaaaccgctgaaagagtcaaacgtaaacaacgtttcatcggcatcaaagaaaatccagtcccatttcatcgtttcaccttgtcttacatactgattggcagagccatgataattgcgtcttcacgcccgtcggccgtagggtagtaattgcggcggatagtcgcctcgttaaagcctaagctttcgtagagcgcgatggcggcgacattcgatgcccgcacctccagccacagcgtgacgacgccgagtttttctacttcatcaataacatgttccagcagttcccgtcccaggccgcggcgctggtaggcggggtcgacggcgatgttaaaaagcgtcgcttcatcaaggacaatctgagtaatggcaaatgccgccatttctccatccactgccagttggtaattcagataacgttcaccctgattgctggcaaaggtttgttcgctccacggaaaagcgtgggcgcgtttttcgatttgccaggctttggataaatcagccgtgctgagggtagaaatcgtgttcatgtgcgcagatttgttgccagagcgcgatgcgagccggcgcgctgctctgaagttcatcaaaaacgggcgtcgagacctgggcgcccgccagcgacagcggcgtctcgcagcccagtcgccagctgttgcagcggctattttgcggcagcatcgctacccggtccggcgtaagctgcagtacctgatcggcgcgaatcgagagcgcgcgcagaatatcgctaatgagcggttcagtcagcgagggcggggtttccgccaccatcaccagacgaatatgttcaggaagcgagatagcgatttcgccctgcaacgcccccgggcgacgcagcgaccactgggtaattcccagttgctgtaattgccagtctcgtcgggaagtcatagcgaaacactcctgttaaacaagcgcgcaatatagcaaatccgtcgtatctgcgccaacaaactactataatcggcgccagtcttattgaaggagtgtttcatgtcagcttttaccccggcaagtgaagtcttgctgcgccacagtgatgatttcgagtccgcccgcgttctgtttgccggtgacctgcaggatgacctgcctgcacgtctggataccgcggccagccgcgctcacacccaacaattccaccactggcaggtcctgaatcgccagatgggcgacaacgttcgttttagcttagtggccgaggccgccgacgtcgccgattgcgataccctgatctactactggccgaagaacaagccagaagcgcagttccaactgatgaacctgctctctctgctgccggtggggagcgatatttttgtgatcggcgaaaaccgcagcggcgtacgtagcgccgagcaaatgctcgccgaatacgcgctgctgaataaagtggatagcgcccgccgctgcggtctctaccacggccgtctggaaaaacagccctccttcaacgccgaacagtactggaacgagtacacgctcgataatctgaccattaaaacgctgccgggcgtgttcagccgcgacggccttgatgtcggcagccagctgctgctgtcgaccctgcaaccgcacaccaaaggtaaagtgctcgatgtcggctgcggcgccggggtgcttgccacggtactggccagtcattcaccgaaggtacgcctgacgctatgcgacgtcagcgctccggcggtcgaagccagccgcgcgacgcttgccgcgaatggttttgaaggcgaggtttttgccagtaacgtcttctctgaagtcaacggccgttttgacatgatcatctcaaatccgccattccacgacggcctgcagaccagtcttgaagcggcgcaggcgctgatccgcggcgcggtccgccatctgaacagcggcggcgaactgcgtatcgttgctaacgccttcctgccgtatccgcaggtgctggatgagacgtttggcttccacgaagtgatcgcccaaaccggccgtttcaaagtttaccgcacggtgatgactcgccaggccaggaaataatcctcttttcccatcggcggcatgctcgacgtgccgccagtccttcccttcgctctgaatagcccatttttgcagcaatcgagaaaacctgcataattaactattgacgtgtcgccgaaaaccactagaatgcgcctccgtggtaacgatactttttagtgtcgatggtatgcgaaggtggcggaattggtagacgcgctagcttcaggtgttagtgtccttacggacgtgggggttcaagtcccccccctcgcaccataatccacgttgatattgctcgcactgggcgaaggtggcggaattggtagacgcgctagcttcaggtgttagtgtccttacggacgtgggggttcaagtcccccccctcgcaccaacgaggcgatatcagattaagaatactgtgcgaaggtggcggaattggtagacgcgctagcttcaggtgttagtgtccttacggacgtgggggttcaagtcccccccctcgcaccaaaaaccctacccctcattgttaaattggatcaaaggtggattcaacatgatcagcattattccactgaccagcgctacgcttgacggcaacagtacgaaatgacgtaactgacggtgccagatcattgccgccgatagtagtaaccccagcacaatcatcacgcgccaggcttccaccggcaggccaatcatgcctaacgccatcaccagtacgcccggcagcagaattccccaaccactccctaaagctcgctgcaacatggtttcgcctctcacaacgataatgataaccaatatcatatgataatttttatcatttgtcatgccagggagtttaacttttattactcttgcattcaggagtaatgacatacattcattgggatgataaattaagcaaattaaatctatatattacattgtctgatcatttgcgcagatagccttatattacgtgttgttttatatttttcccctttggcagccatcatcttgaaacttaactactaataatgatagtaccaatatgactgcacaaacctggcgggctcattacgagcaaaaatatcagtattccttacgactttttttattacttaattgtgtttctgccgctctgtcgctgctcagtccgctgtttaccattgtcaccgtcacgctgccgagttcgctgatctgtgccgccagcctggggttcttgttatggaattggaaatttccaaaacagaaaataaatattcctgttatttctctgttatttggcatgctatgggcctggcacatcgtaataaaagcctcattgttaccacctccacattttaactttctggttattgccttattaagcatcctgtttattggaactatcgctttttctaacaatatcattgcctttactctacattcgctaccgacttttatggtgtgtctggtactggccggcggcgaacagtggatgcggatgttttactgctttgtcctgccagttgctggaattacgttgcaaaacattatgcaaaagcgcagcgataattttacccaagggctaatggataaactgttgcaagagcgtaacaccctgaacgatctcagtatgcttgatccattaaccggcctgtataaccgccgtggcctgcaaaaccggatggataacatcctggcagtggatacctgcgaacatttcatcctgcttttggatattgaccatttcaaagcctacaacgataactatggccatatgatgggcgaccaggcgctaatccaggtatccgcggcgattcgtaattccgtgcgttcacgcgatatcgtcgctcgatttggcggtgaagagtttatggtggtgctgaccagcagctcggcggaatccgccttccagacagcagagcgtattcgccaacgggtttacgatttaaaaatcgcgcatcgttttaacgaaagcgtcgccactcatgtcactatcagtatcgggatgacccctctggtgagtggcgacatcgacagtgcgataaaacgcgccgatagcgcgctatatgaagccaaaaaccagggacgtaatatcattctcgtcaactaacgcttccagcccgccgcgagggatgtgcggcgctgacaaatcgcttgcgctccctgcaacgaacaactagtatcagaaatcattatcatttagatttgtatctggaaatctgatggcttaccgtaccttctccttcagcgatgacatcatctggcgtgcgccgcttgcgcccgtcgagcatgtattggcgaatgcggtacgggaaaagatcgctgcggtacgcccgcatttactggatttcctgcgtctggatgaagaagcgcccccgtttgctctaaccctcgcggaatggtcacgaccaacgtcccttagttcattactgtccacctattccgaccatatttatcgccatcagcccagccaaccgcgcgaacaaaaacccctgctttcactgtgggcgcagtggtatatcggcctgctggtgccgccgctaatgctggcgttgcttacggaagaacaggcaattagccttgaaccggagcattttcgcgttgaattccatgaaagcgggcgcgcggcttgcttctggattgacgtgcatgccgaccatgatgcgttgatgcttcctgcgcaagcgcgtatggatatgttggtcaataaagccctgaaaccggtggtggaagcgctggaagctaccggcgacattaacggtaagcttatctggagcaataccggctatctgattaactggtatctcggtgaaatgaaaaatctgcttggcgacgagcaggtgaacgcgctacgtcaacactgtttttttgcaaaacagcaggccagtggcgaggataacccgctgtggcgaacggtagtcctgcgcgaagggctgctggtacgccgaacttgctgtcagcgttatcgcctgccggacgttcaacaatgcggcgactgcacgttaaagtaattacctgacgggcggcaatatgccgcccgttgtcattttatgcggtctgctcgttctcctgtgccgcgcgctgcgcctcttcagcttcctgcgccagcagttgcttttcgtacactttaaagaacgggaagtagatgatagccgatacgcaagcgaggacaacgaccagaatcgccgcgcggaaatcccatcccaacgcccatgcgccgccaatcggcgccggcgccgtccacggcacaacggagataacacgaccgatcagatccaacttcatggccgcccaggcaatcaccgcgttaaccatcggcgccagcaggaacggaataaagaataccgggttcatcacgataggcgtaccgaaaataaccggctcgttaatgttaaacaggctgggcaccacgcttaaacggccgatagagcgcaaatgcgcggaacggctgcgcagatagcagaacaccagccccatggttgcgccggaaccgccgacaacgatgaagaacgtccagaacgcttccataaaaatatgcggcagcggcgcgccctgcgccagggcctgctggttcattcccagattagtgagccagaacatctgcagcatgccggagacaatcgccgccccgtgaatccctgcgaaccacagcaggtggccaatcaacactgccagcagaatggccggtaatgaatccgcggcggataccagcggtttaaagatagccatgatggcctgcgggatcagcatgtcgaaatgatgctggataaacagactcaacggatagagcgtcagcaccaccaccaggaccgggatcagcaaatcgaacgagtttttgatcatcggcggcacctgatccggcagacggatcccgatattgtgcgccttcaggaatcgcatcatctccacgcaataaatcgccaccaggatcgcggtaaagatcccggtgccgccaagactatcaaccggcagactgccattggtttttggcgcagcgatcagcaggaacgccatgatcgacagcatggcgcacatgaaaggatcgagttggtgcgccttttcataatgcttgcccaggttgtaggaaatcgccgcgcagatataaatggacatgatgcccatggtcatatcaaaaggcgtcagaatgcgtccttcgaactctttagccaaatccagccaggcgcgggcgaagccccaggtggtatccggtgaaaaaggcggataagcgaagactaagagaaaggaacctacgatcataaacggcatggccgagataaatccgtcacgaatagccatgacgtggcgctgcgaagaaatgcgcccggcaacgggacttatatagttctctacaaagcgaaatatcagattaaacgcagcatggttagcagacatagcagccctcctgacaggctatcgaaacaggcccaacaacggtaatcttgccgctatgctgaaattaactgcgtatggacagtagctacccggggtttaaggtcgccatattgtcagcagaatcatctcacgcgcggctgttagttatctttgctacagggagttaccttgtcagtattcatcgacgaaggtcatactgcaaccggttacagtaaccggttgcggcgattgtgaagaagatccagaaatcagaataattcctgattatctatcgacaatatttacagatttccgaccttgtgacagatttaagcggaaaactatcaggagaaccccatgagtctgcagtccgtgaggcagttttttgctgaacatgcccccgatattgaaatcatcgaattgaatcaaagtacggcgaccgttgcgcttgccgccgccgcgcatcgggtcgagccggggcaaatcgctaagactttatctttaaaagtaaaagaccgggttatattaatcgtcgccaaaggcgatgcccggctggataataaaaaactgaaagacgctttcggggcaaaagcgcgaatgctcagcagcgatgaagtcgttacgctcactggacaccccgtcggcggcgtctgcccgtttggcctggaaaatccgctgccggtttactgcgatatctcgctcaaacaatatcccgaagttctgccagcagcgggggctattcatagcgcggtacgaatttcacctgaacgtatggcgcaactgacagaagccgactgggtcgacgtctgcctgtagattgccagttattgcgccaggcgcattccccggccatcgtcattattagccggcagacacagcaaaatgtccgccgcgctcagtaggccaatatcagagttaacgcccagcttggtcatcgcgttaaatttatgtgcgcgaatagttttgatatttcgatcaagctgggtggcgatttcgggtaacgaatagccgtaagtcatgtaacgcagaatggtatgttccgttgggctaagaatatgcccacaagagttatagctgcgattgagaatgctttctttatccaacggcgcctgttcgattagctgcagtaaacgttcctgcaggcgagtaagacaagatgatttattgaggatagtttgtgggcttgagggcgtcagatgactgatcagacgcatttccgccgtattatccgccagtacgattcgctgtatttcagggcgggtttgcgcaatttcgtgtaaaaagagcaggctttccaggcgaatgcgcctgctaccggaaagagaaaaaataacggcgataaagtttttggaagcgaattcgcgctttaaggcctgagtatctttataaaaatggacgctatattttttacccgcttcattacttaaaatgtaacgaagcgccatttcagtcattgcgcatttttctacgatagcgacacatcgtgttgtgagatttttttccattccgtgttatctccataggctgaatacagattcagttccttcattccttgagcgctattgatccaggcatacatttctgcattactgcgtaacgaaagtcggcgcatggcgctatttttctgcgcgcttatcgttttattgctttttttcaacaaagcggcaatctgattaattccccacccttttgccagaagccgcaaaactttgcgttctgaaaaagttaagatgaccgtctcgccagcgtcatcacctaagttatccatctcgggtgaaaaaagtgtctggctaattctctcagcggaaagtttgccggcgcggatgacttcaatgaaacgtcttaccggctcgctatcagaaatcagcgaactctccggccgcatgagaaactcgactgccaaagggaagcaggagtggccaaccataaaaatccagtgaatatcccggtattgattcattaacgaataataatgttcacaaatatctcgcgggcgttcaatgtgtccggagaggtcaacgacgaccagtacggcgcggcgaagctgcagtaacgtgagttcatcctgcgagccacagaaactcagatcgtaatcagggagatgctccctcaaaatagccttcaggccagattgcataactggtattctactgatgatgacgccaaatttaccttgtcctggcaacataaaacctccgcttcctgtcaaagattcacatccaaaataaatgatggatgaatggctactataatattatttcacctactgaatctttatcgtccctggtgggcataatgcacgccctgaagttaattccataaccgtgagggatatataactattactctcaccaacgatttaccctaacacaaaatgatgccatcaataaaattagaaaaaattaaagccctcattagaaaaattaccttaagaattaaataaataacttatttaatttctttcctaaatgcttttggcgagacgccattatatcgccgaaagaatctcgaaaaataagcagcgtcagtaaaccctaaataatcagaaagttgtgtgatggtcatgctggtatattgcaggttacgccgcgcttctaacattaagcgtcgatgtaagacgcctaatgcgctgcagccatgaaattcacgacacaaataatttaaatgcgttgtggaaagccccactagctttgcatattcagccagcggcaaatgttcccggtaatgactttcaatcaggcgggaaaaatggcgcataacgctacgtttacgttcggctttgtcttctgctatcggtgtcggctggcactgacgattcaaccataccaataacgcccccagcagcgaatgcagcatcatttctcgcgcatcatgctcctcgcagtactcttcacgcaaagcggtaaacagcgagtgaatatggccgcgtgagcgttttaccgccacgcactgcggctgtgatagcacatcaagcgttcgaccaaactggctttcaaagcggctcagcagcggcagtgaaagcgacaggacaaatccctgagtaccgggggaaaaacggaagccatgaatgcataatgccggcacaacctgaatacaggcttcggtcatgaccctcgtcgcgccctcaacttcgatttcagcgcgccccttgtgcagatacaatagctgcaccatttcggcatgttgatgcacgcggatatgccactcataaaggctgctgcgctgcaaaatagattcacaatgcagcagatccggcgtcggccaaccgcgctcttcgccatataatttaaaaacagggatcgtacttgcggtcgacatggcatctccggttttcgttagccgttacgttacctgctccatcggcaaacccacataattttcggcaatcgtcgtcagccctgcgcgagaccccagatagtagcggcggtcggcggactgcatttttttatcgaaatcactttgttcagggaagtcatgcagcaggcgagtcataaaccagctgaatctttcacctttccatacgcggtcgagagcgaagcgcgaatagctcgcaagcaggtccgcacggccatggcgataatactcgcgcaggatccgccataataaatgaacatcggcggcgcccagattaggccccttcgccccggtgggcggtacgatatgcgcagcacgcggaccagaaatagccggccatactgcatgggctcgaggacatagctgcgcagcggtgcaatgcttttctcaagtgagtgaccagtcattaacttacttgccagatcctccggcagacgccgctttaactcattccagaagcgttcatctgaccatgccgagacgttatcgcttaacggcacctgcagataatagcggctgcgagtgagtgagcgctgactacataatacaaatccccgttcgtgatgggcgtaaatcagctccggatttaccggcggcgtgtccgccagcaaacctaaccagccaaacggccacacgctttcatactctttgagaatgtcacgtggaatgctttgccgcgaaacgccgtggaaaccatcgcaaccggcaataaaatcgcactccaggcgacacttttcgccgccgctcacgtaagagaccaccggtcggtcgctcttaacatcctcgattgccacctcgctaacgccataaataatcggcgcgccgctgtcgcgtcttgccgccatcaggtcacgggtgacttcggtctggccgtagaccatcacgcttttaccgccggtcaactcgctgagcggtaccggtacccgctggccttcaaataaaaactccacgccatgatgaaccagcccttccgcatccattcgctttgctacccccgcttcacgcagtagctcgacggtaccgttttcgaggatccccgcccgtatacgtcccagcacatattccgcgctctgacgctcaaggatgacggtatgaataccagcgttatgcagcagttggcctaacagtagccccgaagggcccgcgccaataatggcaacctgtgttctcatggggtctcgctctcaaaggttaattatttgtttattttttgtttactaaaagttcctggatgcatttttgataactcaaacgggaaaaagaagggatgaatggcggtaaaaattgcactttccaacgaagtggtgaaagtgtggcgcggttcaaatttcagccaacgccattgatggagcaatttttgcacattgtttgatccggcacgccgcacaacggggtggagttcaggtacaagtatcaatagaaacgcggacagcaggtacttatgcaggcagataaatcagagcagcgcgccgtcacccggttgtgcatccagtgtgccctttacttactccagcacggtgcggaaagcgcgctggttgaggagctttctacccgcctcgggcgggcgttaggtatggatagcgttgaaagcgctatctcctctaatgcgatcgtactcaccacgattaaagacggcgaatgtctcacctccacgcgtaaaaacagcgatcgcggaattaacatgcatgtggtgacggaggtacagcatattgtgatcatggccgaacataagctgttggattacaaagacgtcgagaagcgcttctcgcagatcaaacccttacgctacccgcgctggctactggtattaatggtcggcctctcctgcgcctgcttttgtaaattgaacaacggcggttgggatggcgcggtggttaccttcttcgccagtaccgtcgccatgtatattcgccagttgctaacccaccgttccatgcatccgcagattaatttctgcattactgcctttgtcgccaccaccatttccgggctgatgctgcgtctgccggcatttagcgagacgccgactatcgccatggccgccagcgtgctgttgctggttcccggctttccgttaattaacgccgtggccgatatgttcaagggccatatcaataccgggctggctcgctgggcgatcgccagcctgctgacgctggcgacctgtatcggggtggtaatggcaatgaccatgtgggggctacgcggatgggcataatctcttatcttttcgacctggtgcaggatatggcgctggcggccatccctgccgtcggctttgcgatggtgttcaacgtcccacagcgcgcgctgcgctggtgcgcgttactgggcgctatcggccacggctcgcggatggtgatgatgagcgcaggcttcaatatagaatgggctacctttctcgccgcgttactggtcggcagtatcggcattcagtggtcgcgctggtatctggcgcatccgaagatatttaccgtcgccgcggtgatcccaatgttccctgggatttcggcctatacggcgatgatctcagccgtcaaaatcagccattttggttactccgaagagatgatgattatgctgttgagcaactttttaaaagcctcctccatcgtcggggcgctctctatcgggctgtctattcccggtctgtggctctatcgcaaacgcccgcgcgtgtaaccgccagcgctgcttcctggcctcgcactatgctactatgtcagcaattcccccactctttgctgttcagagttgagatagcgttatgtcttcacgaattttaaccaccgacttttgcggtcttgacgatttcgtcgagaaccacgcggccaggctgcaaaaatcagccagcggcgccgtcgccgtatttgccaataacgccccggcgttttacgcgctgacgccggagcgcctggcgcagctgctggagctggaagctaaactggcgcgccccaccagcgatatcgcgctggacgcgcagttctttgatgagccgagcgccgcgcccgtcgccgtgccgatgggaaaattcgccatgtatgccggctggcagcctgatgccgattttcagcgtctggcggcgctgtggggtatcgccctgacgcagccggtcaccccggaagaactggccgccttcgtcgcctactggcaggcggaaggcaaagttttccaccacgtgcagtggcagcagaagctggcgcgtagcgtgcaaatcggccgcgccagcaacggcgggcagccgaagcgcgatgtgaacgctattagcgaacccgataaccagatcccgcgaggtttccgaggatgagcatgaaaaacgttggcgatctcatgaagcgcctgcaaaaaatgatgccagcccacgtgcaaccggcgtttaaaaccggcgaagagctgttggcctggcaaaaagagcaaggtaggctgcgttcagaggcgctggagcgggaaaatcgggcgatgaaaatgcagcgcacctttaatcgctccgggatccgtccattacatcagaactgttcattcgataattaccgggtcgaaaacgatgggcagatgatcgccctatcccgcgcccgccagtacgttgaagagtttgacggcaatattgcgagcttcatcttctccggcaagccgggcaccggtaaaaatcatcttgccgccgctatctgcaacgagctgctgctgcgcggtaaatcggtattaatcatcaccgtcgccgatattatgtcggcgatgaaagatacctttggtaatcgggaaaccagcgaagagcaactgctcagcgacctgagccgggtcgatctgctggttatcgacgaaatcggtatgcaaaccgaatcacgctacgagaaagtgattatcaaccagattgtcgatcgtcgctcctcctcgaaacgcccaaccggcatgctgactaacagtaccatggatgaaatgaacaaactgctcggcgaacgcgttatggatcgcatgcgcctcggcaatagcctgtgggtgaatttcacctgggatagctaccgcgatcgcgttaccggtaaagagtattgagagatttccgagcgcaagcggcgttatactgaagagattcttaagtaacgacgaagagtacgtttatgaaatctttgcagacagctttttgcgccgctatcgcagccggcgcgttgatggcggcccctacctacgccgcctcctggcaggactcgctcaatagcgccgccagccagctcagcagcagttcccagcaaagcggcggcggtatgtcgatgtcgtccttaaccagcctgctcaatggcggcaaccaggcgctcacctccagcagcatgaacaatgccgccggcgttctctcttattgcgcgcaaaaaaaactgacctcggtcaccaacgccgacaacgttaaaaaccaggtactggataagcttggcctgagcacgccggagaaacagaaacaggataccggttatctggaagggctacagggattgctgagcagtaataacggccagcagttgaatctgaacaccctgggcagcagcccgctggctgaaaaagtgaagaccaaagcctgtgacctggtactgaaacagggcgttaacttcctgtcttaaatttccccgccgatgccgcgtttggcgctttagcgttgccagcgcggccgcaatcgctatttttacttttctgctcctgttttccccgtgacgacaggatgagacatcgtacaaaaaagaggctttctaaaccaattctgaatcacagcacactttcatgacactacaattgcagcagaaaggcgctgcgattacagtgtagcgtgaaaatcgatctatccggccagcccgccgctggcgtatacgagggttagctgtgtcagagttgttatccatcgccttgtttctcgcctcggtggtgatctatgcctggaaagccggtcgcaacacctggtggttctctgccaccctggcggtgttggggctgtttgttgtgcttaatatcaccctgtacgccagcgactacttcaccggcgacggtattaacgatgcggtactctataccctgaccaacagcctgaccggcgcgggcgtcagtaaatatattctgccgggtatcggtctggtgctggcgctggtcgccgtatttggcgctctcggctggatattacgccgtcgccggcatcatccgcatcactttggctacagcctgattgcgctggtactggcgctggcctccgtcgacgccagcccggcgttccgtcaaatcaccgaactcgtgaaatcgcaatcccgcgacggcgatccggacttcacggcttactacaaagagccgtcgaaaagcatcaacaatccgcagcttaatctggtctatatctacggcgagagcctggaacgcacctatttcaataacgaggctttccccgaactaacgccggaactgggtaaaatcaaaagcgaagggctggatttcagcaacaccgcgcagcttcccggcaccgattataccatcgccggcatggtcgcttcccagtgcggtattccgctgttcgcgccgttcgaaggcaacgcttccgcggcggtatccagcttctttccgcaaaatatctgtctcggcgatatcctgaaaaactccggttacgaaaactactttgtgcagggcgccaacctgcgttttgccggtaaagacgttttcctcaaatctcacggcttcgatcacctgtacggcgcggaagagctgaaaacaacggtggctgacccgtcctaccgcaacgactggggcttctacgacgacaccgtgctcgacgaaacgtggaaaaagttcgaagcgctctcccaatccggcaaacgcttttcgctgttcgctctcaccgtcgatacccaccaccctgacggctttatctcacgcacctgcgagcgtaaacgctatgacatggatggcaaaaagaacctctccttcagcgccgtggcctgtagccaggagcacatcgccgcgctgattgaaaagattaaggcctcgccgtacttcaaaaatacggtcatcgtggtttcgtccgatcatctggcgatgaagaacaccgcctgggattatctgaacaaacaggatcgcagcaacctgttctttatcctgcgcggcgaccagcctcaacaggatgtgctggccgtgaagcgtaataccatggataacggcgcaacggtattggatattctcggcggcgataactatatcggccttggccgcagcagcctttctgcagagtcgctctccactatcttcatgaacatgaaagagaaagtgctggcatggaaaccggacgtcattcgtctgtggaatttcccgaaagagatgaagaatttcagcatcgactcgcagaagaacatgatcgcattctccggtagccacttccgtctgccgctgctgctgcgggtctctgatcagcgcgtcgagccgattccggaaagcgaatattccgcgccgctacgcttccaactggcggatttcgccccgcgcgacaacttcgtatgggtcgaccgctgctacaagatgggccaactgtggcggccggaactggcgctgtccaccgactggtgcgtctctcagggtcaactgggcggcgaacaaaaagtacagcatgtcgataagccgcagtggcagggcaaaaccgcctttaaagataccgtcatcgatatggagcgctataaaggcaacgtcgatacgttgaaaattgtcgataacgatattcgctacaaagccgatagctttgtgtttaatgtcgccggcgcgccggaagaggtcaaacagttcagcggcatctcgcggcctgaactgtgggggcgctggtctaatgcccagctcggtgacgaggtgaagattgaatataaagaaccgctgccggaaaaattcgatctggtgatcaccgccaaagccttcggcccgaacgccaaccagccaataccggtgcgcgtcgggaaaagcgagcaagtacttactttagccaatgaagtgaccacgacgacgctgcatttcgacaatccggcgcgcagcaacaccttaacaatcactccgccggagccgcagtccaccaacgaaggcaatattgtcggccacgcgccgcgccagttgggcattggtatggtcgacattaaaatcgtcagtcgcgaaggttaacgcctgcggcccggcgtctgcgccgggctagttcaagcgcaggcacatctcgtactgctgcagcgccagcggcgcatagcccgccgatttaaacagcggcgtgaaggtttccgggatggtcaccgaagtgcttaatcccggaaactgttgagccagcgcgagcagcatttcccgccccagcccgcgtccgcgcgccgccggcgtcagccataaaaactgtagctgcggcttactggcggtggtcgccagtacggcgaaggcctgctgctgcagcgtcaacgcccgacagggcaaggtaataaaggtcagcggatccagcagccacggcagttgcccttccagctccaggcttgcatgacgcagcaggctcagcaaatcatactcatccaggctggattcacgcggctccgcttgccccgcgctgagatagccgcacagcccgtgacgcacggtaaagcccaatgactgatacagcgccaccgcccggtgattatcgcggatcacctccagccacattcgctgtacgccctgagcgcgtaaatcggcgataagcgaggtcatcaattgtcgccctcgtcctttgccgcgaaagccgggatgaatagcaaaagccgccagccgcgcatcgcgcccgcggcgagcgatgagcccgatagccgccggttcatctcctgccagccacaccttagactgcaacaggtttaacccttcggcgctaaagcgctgtacaaacagatctaccgacatcgacaccggcaccagataatcggcaaagcagtcattcaaaatcgtagtcaactgcgcgccgctaaactggacggcaggaacggcggtgaactccatgcatttctccctgaggctgctatgctgaggcgatgaaaactaacactataaaccccgccatcacttttcgcctgactgaagaaggcgatctgccactgctgcccgcgctggaacgttcggcggcacaatcctttgcgcgcattcccgctttcgcctggctggcggaaagcccggtaatgagcgttgaacagcaccggcaatacctggaaaccggccatagcctgctggcgctcgctgaccacaggcccgtcggtttcctgctgagcgagccgctggacgatgcgctgtttattgtagaaatctccgtccatcagcagtggcagggccagggtattggccgcgccctgcttagccaaactatcgacaacgcccgccgcgacggcttcccggcggtgacgctcaccacctttcgcgaggtgccgtggaacgcgccattttatacccggctgggcttcaccatcctcaatgaactgcacctacccgaagggctggcggcgaaacgcgcgctggaaacggagcacggcctgacggcggaaacccgctgcgcgatgcgccttgatttttaacgccgcgagaggcgccgcgctgattttgtcaccggcatatggtacaaagtaccattcccaatacataacctgatacccggaatggcctactcgatcgatatcatctcctgcatcaccgaccgctttatggcgctgaccgcgaccgaaaagcgcattgcgcagtttattctcgacgacgtcgccgccgcggcggaaatgccgattgccgaactggcgcgcctgaccgacaccagccaggcatcggtgacgcgctttgcgcgtgcgctgggctgcaaagacgtgcgcgaactgaaaatgaagctcgcccagtcgctggccattggtcagcgctttattctcgatgtgccggatctggaaggcgtacagggaatttatgaatcgatcatcagcgtactggaaaccaaccgccgggcgctggatcttgcggcgctgaaacgcgcggtggaatggattagcgacgcccgccaggtgcttgcgctgggtatgggcggcggctcgaccatctgcgcgcaggagatccagtatcgcctgttccgcctcgggttgccggtagtcagccagagcgacggcctattggtacgcatgatgagttcggcggtgacggcgaaagatgtggtaattgtgctgtcgctcggcggctataccaaagagatgattgaaagcgccgctatcgcccggcaatacggggcgaaaattgtcgctattaccccgccggaaacgccgctggcggcgcaggccgatatcgtgctgccgcttctggtgagcgaaaacgactatatctttaagcccagcgcctcacgctatgcgatgctggcgatggtggatgtgttggccaccgagctggcgatggccaataaaccgcaggcgaaagaccgcctgcgccgcattaagctggcgctcgacgaccaccgcgacggcgtcgaccgactgccgctcggcgattaatcgccgcaagcggcgataaagcgttgcgcctgctggcgggtacgcgccaacggctgcccggcgcggtagagatcgctgcctagccccgcccccgcgcagcccgcctgacgccagctgtccaggttttccggcgtcacgccgccgaccgccagcaccggcacctccggcggcaacaccgctttcagcgcgcggatatagtccgggccgaatgccgatgacggaaagattttcagccattgcgccccggcatccagcgcgctaaacgcctccgaggccgtggcgcagccggcgcacaccaacatccccttatctaccgcgcggcggatcaccgccggggccgtattgggcgtcacgataagtttcgccccggcttcagccagaaaatcaacctgttcaaccttcagcaccgtccccgcgccaatcaccgcccgctcgccaaactggcgcaccatcgccggaatactttgctgccagtccggcgagttaagcggaatttcaatatagcgaaaacccgcctcgataagcgcggcgatatgctccgccgcctcaccaggctgaataccgcgtaaaatcgccaccagtttaaccttgtccatcaatcatcctcgctatacccgaaagaaacgccgcctcgccggaacaacaggaaacggcgaacccgcgcgccgccatcgcctgctgataacgggtgctgagcgagtgctcaccaaccagcaccacgcggctggcgcgatagcgttcgctaaaggtcgccacctccgcgccaatcaacagcccggagagataatcgctcaccgaagtcgccgccagcgcgcctaacacccgcgcggcccgagcgctgaataacccgtccagcagcgctggctgagttagccctttttccataccgagagcgaaagcggcgtcatcgggttgttgtaccagcagttgctggccgagcagcgaatggttaagcagcaggtgatgcagttcgcctgtcatcgccgtggcgaactggcgcaccacgccgttttgcacctgcacccatttgcagtgggtgccgggcatcacgtaacactccgctggcatcagttgccaggcgcccagcagctgcgtttcttcaccgcgcatcacatcgtactctgcggcctgcgccactttcagccccggcacgatccacacgttttccgccacctcatgtaactgaccgttgagcgcctccagcgccagcgggcaggccagataaggcaccggttgccagccggcatcactgccgatcatgcccgccatcaccaccggcagcgcggggtcgccgcgccacggcgccagctgctgctgaaataccgcttcggcgcgctgcccgttcaggcgcgtgacgccgcagggcagcttcagctggtcgatgcattcgccatcacgcatccgccatgcccgcagctgcgtagagccccaatcgacggcaatatactcgttcatgatggccccttacccgcgtgaggtatgacgtttgccaatcggcagcggcggcggcgttgggcggctttcacgctcgcgggtaatcatctccagcgcctgctcgcggctcatgctgctggccggggtcagtaacgtcaccaccaccgaagccaccaggctcgtcagtaccgccggaatacacggattgccccagaatgccagccagtcgctatccaccagtaccgcaaccgatgccccggcgccgccggccagcgcggcgaccgcgccctgccagttaaaacgtttccagaagcggccaagcatggtgcagataaacatgccggacataatcatcgagatcattttggtgatatagctgatgatgtcgttggaggtcagcgcaaacagcagcgccagcgcaatcaccagaaccaggaagatccgcgacaggcgaatcgctttctccggcgcgggcatatggccggtcaccagggtgtagaggtcgcgcagcataatggacaccgcggcgatggcatcagagctaccggaagacatattggccgacatcccggcaatcaggatcgccatcgccagcaccggcggcagcacctgagtggcaaacaagaaagcgaagccgctgttttccagctgcgggttcatggtccataccgccataccgatgatcgccggcaggaaggagaagcccagatacagcaggccggtaatggtaaaggactggcgcaccgaggagacggtcttcgccgagtaaatacgctggcgataagaaggcgtcgccagcacgccgacgccgatcaccatcgccaatgatagcgccggcaacacgcctaatttatcgaccgcgaacaggctttgcgccgccggatcgacggcctgctgaatatggctccagccgccaacgtgatgaaccgccagcaccgccattaaaataaagccgacgaacagcacgattgattgaatggtatcgatccacaccaccgcggaatagccgccgataccgacataaaccacaaaagccagcgcgataataattttcgcgacattaatatcaatgccgctggcccacgccagatataatccgccgcctaatatatgcgcccccagccagccgatagaggcaataaaaataagtatcgcgacgaggtttttaataattttactgccgccggtgtaatacgacatttcttcactcatggtcatgaagcgaagtttacgtaccggtgcgaataaccatgccaccagcaggatccccaccgcgccgccaaggccgtaaagcatcccggcccagccgttgctgtagccaaagccgacggcgccgacgctggagccggtccccaccatggtgccgaccgtcgaaccgagagtgaggatcatcggcagcgaacgaccgccaagtaaaaagtcttcgccggttttctgtttgcgcgaaacgtaccaacctaaagtaatcatcgcgcaggcataaacggaaaaccaaatcataaatgacatattattcatggctcacatccagacgtaataaataatattcgtgccgctgaatattatgagttaacaggaaccatgcctgaaaaaaggcatagcgaacccagtggcaccgatttatttattcactctggtgccgatatcacatttttttgatgatccctcccggaaagggagggaattatttttttgccgtcaggcgttattgtcgtgcagcgttaaaacaggtcacatccacttcaactttgcaatccaccaccaggtccgccacgcagcaaatgcgcgctggcggattatcgccaaagaactcgcgaaataccttattgaacgactggaaatagcgcgcgtcggtgaggatcactttcacgtgtaccacgtccgccaggccgtaaccggcttcgctcatgatgtcgacgcagttctggatcgccagccgcgattgttcgacgatgccgccttctacgacttcgccatttttcatcggcgtctgcccggagacatatagccatccgccggcttccaccgcgcgggcaaacggcagatgctgaccgccggtgccggtaccgccttctacgccataacgtttgatactcatactcaactccttagtccatccgacggcgcaggaaacgccctgcccgcccggtaattttcttatcactgccgtagctcatcacgccgttgaccatcaccgcctcaatgccgtccgccggtcgtttcgggtcggagaaactggcgacatcgcgcaccgtctgcgggtcaaacagcaccaggtcggcaaagtagccaattttcaccagcccgcgatccgccaactggaagcgcgccgccgacagcccggtcatcttgtgtaccgcggtagtcagcgggaatagctgctcgtcgcggctatagtggccgagtacccgcgggaaggcgccccacaggcgcggatgcggcatcggatcgttcggcagcccgtcagagccaatcatggtgaccggatagcgcatcactcgccgtacgtcctgctcatccatgttgtagtagatagcgcccgccggcatcagccgcgccgcggcgtcgtgcaggctcacctgccactcattggcgatctgctgcagcgttttccccgcctgctccggctgcgcttcggaccaggtgatcacgatatcaaactcatcggtcacctgtttcatatccagcgtcgacgagctggcggagtagggataacagtcgcaggcgatatcctgctgctggcgcatctcatcgaaaaacgccagcgtctctttggtacgcccccagtttttcgccccggcgcacttgtggtgcgaaaccaccaccggcacgttgccgtggcggccgatgcggaaggcttcatccaacgcctcgagaatcggctcaaactctgaacgtaaatgggtggtatagacgcccttcccggctgccagctcttccgccagcgccatcacctcttcggtagtcgactggaaggcgctggcataggccagcccggtactgagccctaatgctccctggcgcagcgcatcgcgtagctgtacgcgcataccggcgatttccgtctcgctcgccggacgaaacagatcgtccatatggttattgcgcagcgcggtgtgaccgattagcgtgccgacgttcaacgacggtcgcgccgcttccaccgcgtgggcataagcctccacggtgggatagataaagtgctgctgctcgccgaggagattcatcgggtccggcacttccccgcgcatggtagcggtcgccgcgctgatcccgcagttgccgacgatcaccgtcgtcaccccctggctgagtttcggcaagtactcaggcatacggataacgttgatatcatcatgggtatgcacatcaataaagcccggcgccagtacccgcccctggccatcaatcacctgctccgccgcgacatccagcgccggggcgatagccattattcggtcgcccttcaccgccacatcagcacggtattgcggcctgccgctcccgtcgatcaccgtgacgtttttgaaaagccagtcaactttcatagcaattactccctttcgacatgccgataagttaaccatttacaagcgcaaaaaacagtggaaaactacgcaaaaccagatcattttgtgatacttttattcaaaacgaataacatttttatattaaaaatatatttatcaaatagttataaatgataccaagagactaaccgattataacccctgaaaggatagtgttatgaaataccattcagcaccgctcatcccgcacaaatccgccctcatgtccgcgccggctaatctgctggcggaagaggtctgtctacccgccgcgctgctaaaaaagtcggcgctggaaaataatatttcatggatgcagcgttacgccgacgcccgcggggtgtcgctggcgccgcatggcaaaacgacaatgacgccatggatatttcaggcgcagcagcgagcgggagcgtgggggatcggcgtgggcagcgcctggcaggccagcgcggcgatggccagcggcatccaacgcgtcctgatggtcaatcagctggtcggcaaggccaatatgcaggtagtcgcgcagctaaaagcccactatcgggcagtggattttatctgctgcgtcgatagcgaggccaacgtgcgcgccctctccgcattcttcgccgcccagggacaaacgctggatgtgctgattgaacttggcgtgccgggcgggcgctgcggctgtcgtagcgtcgatgacgcgctggcgctggcgcagcgggtaagcgatctgccggggttacggctacgcggactggaattgtatgaaggagtgctgcacggcgacgatccgcaaccgcaggtggaagcgttattacaacaggccgcggcgcttgcctgccgcatggagtcgctggttgacggcgaatttattctcaccggcgcgggcaccgtctggtatgacgtggtgtgcaacatctggctggcggcggcaaaaccgcgccgctgccgtatcgtcatccgccctggctgttatatcacccacgatcgcgggatctacgatctcgcacaacaagaactgatcgcccgcgatccgattgcctgcgatctcgccggcgatcttacatcagcgctggagctgatggcgatggtgcaatcggtgcctgaggcggatcgcgcggtggtaaacttcggcaagcgcgactgcgccttcgacgccgggctgccgcagccgatcgcccattatcgtaacggccagcagttagcgctgcgcgcggagtcgctcgtcagtatcggcatcatggatcagcactgcatgctgcgcctggcgccgggcagcgatgtgcaggtcggcgatattctgctgttcggcacctcgcacccctgtctgacctttgataagtggaagacgttgctgctggtcgatgacgactacaacgtgctggacgagctcgacacgctgttttgacaggcatcccgggtggcggcgcttcgcgccttatccaccctggcgcaaggcgcaaatctcatcatgcaatgaacggctgatggcgaccccctgccgctcactctgctggcggcaggcgaaacgccgctcgcccggcagccgcgcgccctgatcctgcatcgcattgaacagcgtttcggcgcgctccagctgctcttgtgcctgcgcgccgagaaagcgctgcggatccagcgccaggataagctcgccgccgtaagggagacctcccgcgccgttatcccacgccagcgattcggcgctggtcatatcgccaataagcggcccggccagcagctcaaccattgccgccagcgccgagcccttatggccgccaaaggttaacatcgcgccgttcagcacctctgcggcatcggtcgttggccgtccctgactgtcgattccccacccttcaggtagcgctttgccggcgcgctgatgcagctggatctcgccgcgcgccgcggcgctggtcgccatatcaacaataaacggcggtttgtcccgccgcggccagccaaaagcgataggattggtaccgaacagcggacgcgtgccgcccgccggggcgacccaggcgtggcttggcgtgcaggccagccccaccagccctgcctcggtcaacggctcaatatcggcaaacagcgcggaaaaatggacgcagcggttaatcgccaacgccgcaatcccgctgtgccgcgccttctccagcagtaacggcagcgcgcgctcgtaggccagcagcgaaaaagcgccgccggcgtccgcccgcgcaatcgccggcgcctgatcgtggatttgcggctcggcatcaggcgataccttacctttacgcaaggtatcgacaatgcccaacagccgccacaggccgtgggaagcgcagccgtcgcgctccccggcggccacattacgtgcaatggccgccgcgtggtcggcgctaaatccattggcgctgagtacctccagcgccaggtcataagcttcaggtaacgatagagttaccaactccatactgttctcctttactcttcttcgtctccgctaaagttagcctgcggcaggcagctgcgcgcgccccagtagtaaatccccaacgacatcgccgccaccagcaccgtatcccaggggtgaccgataacattaagcccgccgaagctgcccagccaggaaaagaggataatcaacgcataaaaaacgatcagccacagcgaagacttcacctgctgcgccaggctcacggtatgttccgacaccttacctttgcacatcacgtagacgacaaacatcacgatttgcagccccaacagccacgagagcgtattccagccggaccagtagacaatcagcgccgagatcataaacgataccgggccgatgatgccgaaggcgcgcacgcggaacggccgcggcagatccggcgcgttgcggcgcagcccggcggcggttaccggggcgatggcgtagctcagcaccagggctgccgataccacgctaatgagctgttcccaggaggggaacggcagcgtccagaaaatcgacagcccaaaggtcagccatagcgccgggcgcggaatcccggacgctttatcaatatgggtaaaggccttaaagaaagtacccgccttcgcccagccgtagatcacccgcggcgtcgcgttcatatagatattgccggtgccgctcggggagataatcgcatcgcttatcaccataaaggccagccagcccatgccgagggtaatggcgatatcgcgatacggcagcgagaactgtttgctcacctcggcccagccgccgttcagcatctcggtggggatactgccaaggaacgccagctgcagcagcacgtagataatcgtcgacagcaccactgataaaatcaacgcaatagggatagtccgctgcggcttttgtacttcgctggccaccgagataatcggcgtcagtcccagataagcgaagataattccgcccgcgctgatcgccgcttccaccccggacatgccgaacggcgcaatcccctgagcgtgcaggttctccggtttaaagaaggcgaacagcgtcaccaccaccagcagcggcaccagaaacttgagcacgctgatgaagttgttcgatcgggcgaaggtcttaacgctgtagtagttaagcgcaaagaagaaacagagtagcaagaactgcaccacccaccccagcagcgtcggcgaactggagcccggttgggtcagcgccggaaaccaggcggcggcatattgccgggcggcgacaatttcaatcgagatcaggctggagaaagcgatcagggtgatgaaccccagcagatagcccatcagctcgccgtgggaaaagaccggatagcgaataatgccgccggcgcgcggcagcgccgcccccagctcgcaatagacaatccccagcagcagcaccgcaaagccgccgatcacccacgatgcgatcccggccggaccagcgatggatgcgacgtggctggcggcgaataaccatccggagccgaaaattgcccccaggccgataaaggtgagatcggttagggtcagctgttttttaaacttacccgactctgcaacgcgggtttgactgttatgcgtagagtgaatggtcatggtgatgcccttgcgtcaatgagaggaggaaatcgcttcccgggtccactggccgttgaccaggcgcagcaggttcaaagggttcgcatcctgcagcgccggcggtaacagggcggcgggcgcgttctgcagacagaccgggcgcagaaagcgttcaatcgcccggctgccgaccgaagtcccgcgtgcgtcggtggtcgccggccacgggccgccgtggaccatcgcatcgcacacttccacgccggtgggataaccgttaaacagcacccgtccggccttctcacaaagcagcggtagaaggctcgccgccagcgggccatcatccgcctcggcatgcagcgtcgcggtgagctgaccctgcagcgctttcaccaccgcctgcagctgggccacgtcgtccacttccaccagtagcgataacgggccgaaaacttcggtctgcagcagcgtatcctgcgccagcagatcctcgacctgagcctgccacagcagggtctgcgcctgcccggcgccggcggagatgccgctcgccaacttctcgatacgcgggtgcgccgcaagcgccgccacgccctgacggtagtgctgaagggtcggcgcattgagcaacacctgcggcgtggagcccgctaccgccgcgcacagcgccgacttaaagcgttccagcccggcgccgcgcagcgccagaatcagccccggacgggtacagaactggccaccgccgagggtgaatgacgccaccagctcgtttgccagcgcctcggcccgcgtctgcagcgcctgcggcagaataatcaatgggttaatcgccgacatttcagcaaacagcggaattggctgcgggcgctgctgcgccagctgatacagcgccttaccgccggccaacgaaccggtaaagccaacggcctgaatcgccggatgacggaccaattcggcgccgatatcggtcccgaaaatcatattgaatacgccgccgggtaaaccgcaccgtaccaccgccctgacgatcgcctcggcggtcagctcggcggtggccatatggctcggatgggccttcaccaccaccgggcagccagccgccagcgccgaggcggtatcgccgccggcggtagaaaaggccaacggaaagttgctggcgccaaacaccgccaccggccctaacgcctgctgatactggcgcaggtccgggcgcggcagcgggcgacggtcggctaaggcggtatcaatacgggcggcgaaggtatcgccgcgcaggatcacgccagcaaacatccgcaactggccgctggtacgcgcccgttctccctgtagccgcgccagcggcagcgcggtctcctgcccggcgatagcaaaaaacgcctcgcccagcgcatccagttcatcagcaatggcgttgagaaagcgcgcccgctgctgcggcgtggtttgtgaatagacggcaaaggcctgctgcgcggcttctgcggcctgagcggcttcctcacaggaagccggataaaagcggtggccggtggcttcgccgtccaccgcccgcaggctcaatagcgtcgcctcaccgctggcaatacggcgtccggcgataaactgccgtcccgccatggtctgagatgcattcatattgactcctgtgctcagaggccgacatccggcagcgtcggacgagtggccagcgcctgttcaacgatcgccaccacctgctggcgcgtttcgccttccagcgccagacgcggcggacgggtaatggcgctaccgcggcccagcaactcttcacacagcttgatgcactgcaccagatccggacgcgcatcgagatgcagcagcggcatgaaccagcggtacaacgccatcgcctcttcgtaacgctgctggcgggcgagacggaataacgtttccccttcgcgcgggaaggcgttggacattccggagatccagccttccgcgccgacggcaatactttccaccaccacgtcatccagcccggcaaacagcacgaagcggtcgccaacggtgttacgcaggtcgataaagcggcgggtatcgccggaggagtctttaaagcagacgatgttgtcgcagtcggtcagggtggcgagaatgtccggcgtcacgtcgtttttgtaaatcggcgggttgttgtagaccataatcggcaggtcggtagcgctcgccacgctgcggaagtgggccgcggtttcatgcggttttgaggagtagaccagcgccggcatcaccatgatcccgtcgacgccgacgcgctccgcctctttcgccattttctgggcaaaggcggtggtgaactcggccaccccggcgataaccggaattttgccgccggcggcatccttcgccacctcgataatctgcagtttttcgtcggtgctcagcgaggtgttttcacctacgctgccgcacaccaccagcccggaaacgccatctttcaccaggtttttcatcaccgcgtgagtggcatctaaatcgagggagtaatcgctacgaaactgcgtgctgaccgccggaaatacgccgctccagtgaatcgcttttttgctcatgctcggttccttgtcgtcattttgttaagtcgaagtgaatgaatggtgaatattcactgacagattgacgtgtcgcggaaccggcggcttgtcggttttccctcaatacgatgacgaaattagcacagtcggcaaaagtgtgagccagcgtttatccgagcagcgtgaggcgaaaatcgcgcggtgtcgagccggtcatcgccttgaactggcggctaaaggcgctgtgatcggtatacccgcactgcagggcgatatcggtaatcggcgtatcgccagccagcagttcggtagctttttccagccgcactttgtggatcatttgccgcggagtgagatgaaagatccgtttgcagtagcgttcgatctgcgcaatcgacattccgcttaaggcggttaactcttccatggcgatcggccggtgataatggcggcggatatgatcgtcgacgatcgccagccgctgccacgccggatggcgggcgtgggcctcctgcagatcgtgcgagatcccggccatgccgatcacctgcccgctgatatcgcgtagcgccaatttctgcgtcaggcaccagccgcgctcgcggccattgtagagatgcatttccagctgatcgcgcagggtcacgccttcccgtagtacccgaagatcctgctcggtgtaaccctggcccagcgcggaaggaaagacatcggcggaggttttgcccagcagcgaggagacgcttttgaaaccacagcggcgggccagcgtcaggttcgccagcagatagcgcgcctgacgatctttgataaaaaagaccacattagggatggcattgagcaggggcgcaatcagcgccagcgcattcagcagcgcgggcatattttccggccgctggcgcgccagcccttcgcagatctggctcagctcatcgacggccagctcaggttggttaaccgcccgcggcggcggcgcatcagaaacaccgatcataaggcctcctcatggtaagtgaccgaaggatatttattcactttccgttaacacctcaagcagcaaccgtcggttttgcgatcctggatccgctttacgccttcccctggtttagccactggcacaatggtcgctttcggtttaccacagcattaaacaaatgattaataagaaataactatgtgaaatagaaatataccgcgctcattactgtgcagatttcgtcattttctctgacgaaagcgctcaagcaggccgggaaaggttgcgccagcatgatgaaacatgttgttaacttccggagagtctgatgaccgcgccacgcccccctattacgctgagagctattgattcacacaccggcggcgaaccgacccgcctgatcgttgacggattccccgacctcggcggcggcggcatggcggagcgccgcgaccgcttcgcccgcgacttcgaccattggcgtcaggcggccattctcgaaccgcgcggtaatgacgtactggtcggcgcgctgctgtgcaaaccggtctcggcggcggctaccgctggcgtgattttcttcaacaacgccggttttctgaatatgtgcggccacggcactatcgggcttatcgcctcgctggcctggcttgggcgtatcaagcctggcgtacatctgattgaaacaccggtcggcgacgtaagcgccacgttgcacgacgatggcagcgtatcggtgcaaaacgtcccggcccgccgctggaaaaaacagatccgcgttgaaaccgcgctgggtcccgtcatcggcgatattgcctggggcggtaactggtttttcctgattaacgaccacccgtttgccattacccccgaacatattccacagctcaccgactacgcctgggcagtgcgcgaggggctggaagccgcggggatccgcggcgacgacggaggagttatcgaccatatcgaactcttcgccgatgacgataccgccgacagccgcagcttcgtactctgtccgggaaaggcctgggatcgctcgccgtgcggtaccggcaccagcgccaagctggcctgcctggcgcaggatggcaagttgcagccgggggaaatctggcggcaggccagcatcatcggtagccagtttaccgccagctaccagcgcaccgctgaaggcatcatcccaacgatccgcggcgaagcctgggtctgcggcgataaccaattgatcctcaaccctgacgatcccttctgctgggggatcgcgccgtgaagcagtgcgacgtcatcgtgatcggcgccgggatcatcggcgccgcctgcgcgtggcagctggcgaagcgggggcagagcgtgacgcttatcgatgacggtcagcctggcgcgacggcggccggtatgggccatctggtgtgcatggatgacgaccccgccgagcttgccttgtcggcgtggtcgctggaacgctggcgcgctatcacgccacggatgcccgacaattgcgcctggcgcggctgcggtacgctgtggctggcggaaagcgaagaagagatggccggggctggcgacaaacagcggcggatggccggccatcaggtgcacagcgaactccagaccccgcagcagatcgccgggcgcgagccgctgctgcgcgacggactggccggcggcctgtgggtgccaggcgatggcatcgtctacgcgccgaacgtcgcccgctggttgattactgatgccggaaaccatcttacctgcctgcgcgatagcgtacagacgatcgaagagccgcaggtgctgctcgccagcggccaacggctacaggcgcgggcaatcgtggtggcctgcggacttgaagccaacgcgctgttagcggaaaactggctgcgaccgaaaaaaggccaactggcgattaccgatcgctaccagccgcgggtgcatcaccagctggttgagctgggttacggcgccagtgcccacggcggcggcacctcggtggcgtttaaccttcagccgcggccaaccggccagctgctaattggctcttcgcgtcagtttgataaccgcgagcgcgagttggatctgccgttgctggcgcagatgctcgatcgcgcccgccacttcgtgccggcgctggcgacgttgaatatcatccgctgctggagcggcctgcgcgccgcctcgcaggatggcaacccgctgatcggcccgcaccccacccgccgtggtttatggctagcgctgggccatgaagggctgggcgtcaccactgccccggcctcggctgaactgctggcggcgcagatcctcgatgaacgctgcccattggctcccgacgcctggctcccggctcgtttatctcaacaggaggcgatcgcatgaatgccacgctcactatcatcgttgatggcgaagcgctgacggtgccggaagggatcagcgtggcggcggccctggcgttgaccggcgaccccaccacccgccagggggttaacggcggcctccgcgcgccgttttgcggcatgggcgtctgccaggagtgccgggtcaccgtcgatggcctacgggtactggcctgccagaccctgtgccggtccgatatgcaaatagaaaggagccgcgatgaacacgctgcgctgtgacattttaatcctcggcgccggccccgcagggatggcggccgcgctctccgccgccgcctgcgataaacaggtgattattctcgacgataatcccgcccctggcgggcaaatctggcgtgccggtccgcaggcgacgcagcccgccctggcccggcgctaccgcgacgccatcgtcgcgtctgccgccatccggttagtgaacggcgcgcggctgattgcccgcccctccgcgtacagtgtgctgtttgaaaccgccgacggcggtggtgtggtttactggcagaaactgatcctctgctgcggcgcgcgcgagctgtcgctgccctttcccggctggaccttacccggcgtgaccggcgcgggcggcctgcaggcgcaaatcaaacagggcctggcgctgaaaggagaaaaggtggtgattgccggcagcggtccgctactgctggcggtggcggatacggtgaacaaggccggaggcgaagtgacgaatatcattgagcaagcgccgctaccggcactgctgcgcttcgccggtgggctgtggcgctggccgcagaagctgcgccagttagcgacgctggctccgaaaggctatcttagcggcacgcaggtgatccgcgctcacggcacaacgcggctggaagccgttacgttgcgccagcgcggcgtcgagcgaactatcgcctgcgatcggctggctatcggctacgggctgatacccaatatcgagacggcgctgctgtttggctgcgccacggcgcaggaggcgatacaggttaaccgctggcagcagaccagcatcgcggatatctacgccgccggcgagtgcaccggtttcggcggtagcgaactggcgctggcggagggcgaaatcgccggttttgccgccgccggggccagccatcaagcgcaggcgttatttgcccgccgcgcccgctggcagcgcttcgccgacgccataaaccgcgccttccggctggcggaatctttgaaaaacgcggcgacgccggagagcctgctgtgccgctgcgaggatgtgcgctgcggcgatgtggcggcagccggaggctggccgcaggccaaacttacccagcgctgcggaatgggcgcctgtcaggggcgcacctgcgccgccagcgcccgctggttgtatggctggccgctgccgcagccgagagaaccgttggcccctgcccgcgcggaaacgcttattgccctcgccaggttgagcgccgagccgtaaccgctactcttcttcatcaccgcgcccggtagggacgccaagcgcaataaactcctccagcagcgtggtcaactgacgcatcttctccgccgtaaactgcgcttctatctgccggtaggcctcttccacctgcgcctgggcgctctcatacagcgccagcccggcgggcgtcagcgacaggtagagcttgcgctgatcgttgaccggttttaagcgcagcactaaaccgtcgcgctccatgcgcgtcagaatcccggtcaggctggggcgcaaaatgcaggcgcgccaggccaggtcgtggaaatccatcgatgggttttccgcaaggatacgcacaatacgccactgctgttcggtcaggttgtggcgtttgacgatcggccggaaatgggccatcgccgcttcccgcgcctgcagcagcgcaatggttaatgaatcatgcatggtatcccctcaacaacgctcaccaaaacttattaacaatttaataattagccataatcctgccatgtacaaccggtttctgcacctgaaaagtaccagccgtcattaaaaataaatgtatctatatgataaataataaataaataaaaaatatgtaaatattgtgttaatccgatcacaaaacattcacttctatttgccaaaccggcgcgcaaagaataaaagatgatcattaacatattaatgaaattccttcgaatcaataatcagtaccagaggagtggtgaatgaaaggtaccatcttcgccgttgcgctcaatcatcgcagccagctcgacgcctggcgcgaagcgtttcaacaggccccctacaagacgccgccgaaaaccgcggtctggttcatcaaaccccgtaataccgtaattggcgatggcgaagccattccccatccgcagggcgagaccgtacaaagcggcgcgacggtggcgctgattgtcggcaaaaccgcgcgtaaagtggcggcggaagaggcagcgcactatatcgccggctacgcgctggctaacgacgttagcctgccggaagagagtttttatcgcccggcgatcaaagccaaatgccgggatggcttctgccccatcggcgcgctatcggtggtacgcaacgtcgacgatctaaccatcatcaccgaaattaacggccgcgaggcggatagctggaataccggcgatctgcagcgaaatgccgcgcagctgcttagcgccttaagcgagttcgccaccctcaatcccggcgacgcgatccttatcggcacgccccactctcgcgtcacgctgcgccccggcgaccgcgtacgtattctcgccgacggtttcccggcgctcgaaaacccggttgtcgcagaaggagagctggcatgaaacaagcacgcattgaatggcaaggacaggtacgcgacgtgctggtcgatgaacgcgaccaggtgcgcctgcccgatggcgcggtattgaaagaaggcgaattccgctggctgccgcccgccgacggcacgctgttcgcgctggggctgaattacgccgaccacgccagcgagctggagtttaaaccgccaaccgagcctttggtgttcatcaaagcgccaaacacctttattggccaccagcagcagtcggtacgcccggataacgtcgaatacatgcactacgaagccgaactggtggtagtgatcgggaaaaccgcgcgccgcgtcagcgaagccgaggccatggattatgtcgcgggctataccgtgtgcaacgactacgcgatccgcgactatctggaaaactactaccgcccgaacctgcgggtgaaaagccgcgataccctgacgccgatcggcccgtggatcgtcgccaaagaggcgatcccggatccgcataatctggccctgcgcacctgggtcaacggcgaactgcgccagcagggcaccaccgccgatctgatcttcagcatcccgttcctcatcgcttatttaagcgaatttatgaccctgcaaccgggcgacatgatcgccaccggcacgccgaaagggctatccgatgtggtgccgggcgacgaggtgatcgttgaagtcgagggcgtgggccgcctggtcaaccatatcatcagccagcaagcgtatgaggagacactgtcatgaaaaagattaaccattggatcaacggtaaaaacgttgccggcgcagactattttcataccaccaacccggccaccggcgaggtactggctgaagtcgcctccggcggcgaagccgaaatcaaccaggcggtagcggcggcgaaagaggccttcccgaagtgggctaacctgccgatgaaagagcgcgcgcggctgatgcgccgcctgggggatctgatcgatcagaacgtcccggagatcgcggcgatggaaaccgccgataccggcctgcctatccaccagaccaaaaacgtgctgatcccgcgggcgtcgcataacttcgaatttttcgccgaagtgtgccagcagatgaacggcaagacctatccggtcgatgacaagatgctcaactacaccctcgtgcagccggttggcgtctgcgcgctggtgtcgccgtggaacgtgccgtttatgaccgccacctggaaggtggcgccgtgcctggcgctggggaataccgcggtgctgaaaatgtccgagctgtcgccgctgaccgccgatcgtctgggcgagctggcgctggaggccgggatcccggctggcgtgctcaacgtggtgcagggctatggcgccaccgctggcgacgcgctggtacgccatcatgatgtgcgcgccgtctccttcaccggcggcaccgccaccgggcgcaacatcatgaaaaacgccggcctgaaaaagtactccatggagcttggaggaaaatcgccggtgctgatttttgaagacgccgatatcgagcgcgcgctcgacgccgcgctgttcaccattttctcgatcaacggcgaacgctgcaccgccggttcgcgcattttcattcagcagagtatttatccggagttcgttaagcgtttcgccgagcgcgccaaccgcctgcgcgtaggcgatccgaccgatccgaatacccaagtcggcgcgctgattagcaaacagcactgggagaaagtgtccggctacattcgcctcggcattgaagagggcgccaccctgctggccggcggcgcggataaaccgtccgacctgccggcgcatctgaaatccggcaacttcctgcgcccgacggtactggcggatgtcgacaaccgcatgcgcgtcgcccaggaagagatttttggcccggtcgcctgcctgctgccgttcaaagacgaagcggaagggctgcgcctggcgaacgatgtggaatacggcctggcgtcgtatatctggacccaggacgtcagcaaagtgctgcgtctggcacgcggtattgaagccgggatggtgttcgtcaacacccagaacgtgcgcgacctgcgccagccgttcggcggcgtgaaggcctccggcaccggccgcgaaggcggcgaatacagctttgaagtgttcgccgaaatgaaaaacgtctgcatctcgatgggcgaccatccgatcccgaaatggggagtctgatatgggtaagttagcgttagcagcaaaaatcactcacgtgccgtcgatgtatctgtctgagctgccggggaaaaaccacggctgccgtcagggcgctatcgacgggcataaagaaatcggcaagcgctgccgtgaaatgggcgtcgataccattatcgtgtttgatacccactggctggtcaacagcgcctaccacatcaactgtgccgaccattttcagggcgtctacaccagtaacgaactgccgcattttattcgcgacatgacctacgactacgacggcaacccggagctgggccacctgattgccgacgaggccgtcaagcttggcgtacgcgccaaagcgcacaatattccgagcctgaagctggagtacggcaccctggtgccgatgcgctacatgaatagcgataagcatttcaaagtggtgtccatttccgccttctgtaccgttcacgattttgccgacagccgcaagctgggcgaggccatcctcaaggccatcaacaaatatgacggcaccgtagcggtgctggccagcggttcgctgtcgcatcgctttatcgacgaccagcgcgccgaagaggggatgaacagctatacccgcgagtttgatcatcagatggatgagcgcgtggtgaagctgtggcgcgagggcaaattcaaagagttctgcaccatgctgccggagtacgccgactactgctacggcgaaggcaacatgcacgacacggtgatgctgctcggcctgctgggttgggataaatacgacggcaaggtggagtttatcaccgagctattcgccagttccggtaccggccaggtcaacgccgtgttcccgctgccggcgcaggcgtaaggaggccgtatgccgcattttatcgccgagtgtagcgacaatatccgcgaacaggccgatttaccggggctgttcgctaaagtcaacgaggcgctggccgccaccggtatctttccgattggcggcattcgtagccgcgcccactggctcgatacctggcagatggccgacggcaagcatgattacgccttcgtgcatatgaccctgaagatcggcgccgggcgcagccttgagagccgccaggaggtgggcgaaatgcttttcgcgctgatcaaagcccactttgccgcgctgatggagagccgctatctggcgctgtcgttcgccatggaagaactcgacccgacgctgaactacaaacagaacaacgtgcacgcgttatttaaataatgtgcaaattgcccggtggcgctgcgcttaccgggcctacaacggccatgaatttgtaggccggataagcaaagcgccatccggcaatgcaatgccacaggaatctctatgctcgataaacagacccgtaccctgattgcccagcggctgaaccaggccgaaaaacagcgtgaacagatccgcgcgatctcgctggattatccgtcgatcaccattgaggacgcctacgccgtccagcgcgagtgggtcgagatgaagatcgccgaaggccgcgtgctcaaaggccacaagatcggcctgacctctaaagcgatgcaggccagttcgcagatcagcgagccggactacggcgcgctgctcgacgatatgttctttcacgacggcagcgatattcccaccgaccgctttatcgtgccgcgtattgaagtcgagctggccttcgtgctggccaaaccgctgcgcggcccgaactgcacgctgtttgatgtctacaacgccaccgactacgttatcccggcgctggagcttatcgacgcgcgttgccacaacatcgacccggaaacccagcgtccgcgcaaagtgttcgacactatctccgataacgccgccaacgccggggtgatcctcggcggccggccgattaaaccggacgagctcgacctgcgctggatctccgccctgctgtatcgcaacggcgtgattgaagagaccggcgtcgccgcgggcgtactcaatcatccggccaacggcgtggcgtggctggccaacaaactggcgccatacgatgtccagctcgaagccgggcagattatcctcggcggctccttcacccgcccggtcccggcgcgcaagggcgataccttccacgtcgactacggcaacatgggcgccatcagctgccgctttgtttgaggagagcaacatgaacaacgcatttaaagaggcgctcaaggccgggcgtccgcaaatcggcctgtggcttgggctgtgcagcagctacagcgccgaactgctggccggcgcgggcttcgactggctgctgatcgacggcgaacacgcgcccaacaatgtacaaacggtgctgacccagcttcaggccattgcgccctaccccagccagccggtggtgcgtccgtcgtggaacgatccggtacaaattaaacaactgctggacgtcggcgcgcaaaccctgctggtgccgatggtgcagaacgccgaagaagcgcggctggcggtcagagccacccgctacccgcctgccggcattcgcggcgtcggcagcgcgctggcccgcgcctcgcgctggaatcgcgtcccggattatatccaccgggccaatgacgccatgtgcgtactggtgcagattgagacccgcgaagcgctgaaaaatctgccgcagatcctcgatgtcgaaggggtggatggcgtgtttatcggcccggcggatctcagcgctgatatgggccacggcggcaacccacaacacccggaagtgcaggccgccattgaagatgccatccagcaaatccgccaagccggaaaggcgccggggatcctgatggccaatgaacagctggcgaaacgctatctcgaactgggcgcgctgttcgtcgccgtcggcgtcgataccaccctgctggcccgcggcgcagaagcgctggcggcccgttttacccacaccgcaaccaccacaaccgataacaataaatccgtctattgaacggataatgtggagcgcaacatgactacctctaccctgcaacacaatgataataaagccgttgaagtagaaaaccgggtgatcaaaaagctgttccgccgcctgatcaccttcctgtttgttctctttgttttctcatttttggatcgcattaatatcggctttgccggcctgacgatgggtaaagatctcggcctgacctccaccatgttcggcctggcggcgacgctgttctacgtcacctacgtgctgtgcgggatccccagcaatatcatgctggcgaaagttggcgcgcgccgctggatcgccgggatcatggtggtctgggggatcgcctcgacctgcaccatgttcgccaccagcccgcatacgctgtacatcctgcggatgctggtcggcatcgccgaggccggttttctgccggggatcctcgtctatctgacctggtggttcccggcctaccatcgcgcccgcgccaacgccctgtttatgatcgccatgccggtgaccatgatgctcggctcgatactttccggctatatcctggcgctcgacggcctgtggaacctgaaaggctggcagtggctatttctgctggaaggcctgccgtcggtggtgctcggcgtcgtcacctggttcttcctcaacgacacgccggataaagccaactggctggataacgaagagaaacaggcgctgaagacgatgatcgatcgcgaacgggaacatgcggcgatcgtcccggcttcgccgcgttccacgctgcgcgaagtactgacgccagcggtgctgatgtataccctcgcctacttctgcctgaccaataccctcagcgccattaatatctggacgccgcagatcctgcagagcttcaacaccggcagtagcaacatcatgattggcctgctggcggcgatcccgcagttctgcaccattttcggcatgatctggtggagccgccgctccgaccggcgcaaagagcgcaagatgcataccatcctgccctacctgttcgccgcggcgggttggctgctggcttcggtgggatcctttaccgcgatggccattttctggaccaccccggatcgggtgatcagcctgcaatcgcgcgcggtggcgctggcggtgatcaacgccatcggcaacgtcggctctgccgtcagcccgctgttgatcggcattttgcgcgataccaccggcagctttagctccgggctgtggtttgtcgccgggctgctgatcgtcggcgcgctggtgctcacccgcattccgatgagccagcgcgaggacgccgccgccgcgccgggcttagcggcgcaaaaaggccactaaggagcgggtatgtgccagcattcaatcgccaacatcgacatcaataaagattacgacgagagtctgggcaccgaagaggtgcactatcagtcgtttgcccgcatggcggccttttttggccgcgacatgcaggcgcatcgccacgaccgctattttcagatgcactttcttgataccggacagattgagctgcagcttgatgaccaccgctattctgtgcaggcgccgctgtttgtgataacaccgccctcggtaccgcacgcctttattaccgagtccgatagcgatggtcacgtgttgacggtgcacgaagaactcatctggccgctgctggaggtgctttatcccggtacgcgggagaccttcggtctgccggggatctgcctgtcgctggcggataaacccgacgagctggcggcgctggcgcactactggcagctgattcgccgtgaatccaccgctcagttaccggggcgcgagcataccctggcgctgctggcgcaggcggtatttaccctgctgctgcgcaacgccaggctcgacgatcatgccgccagcggcatgcgcggcgagctgaaattattccagcgctttaaccagatgatcgacagccacttccatcaacactggacggtaccggattacgccagcgagctgcatctgaccgaatcgcggttgaccgatatctgccgccgcttcgccaaccgcccgccgaagcggctgatattcgaccgccagctacgcgaggcgaagcggctgctgctgttttccgatagcgcggtcaatgagatagcctggcagttggggtttaaagatcccgcttattttgcgcgcttttttagccgccaggtcggctgctcgccaagcagttaccgggcgcaaaaagtaccggtatcgtaataccccggcggcgctgcgcttgccggggctacggtccatagggcctgtcagcgccgcgccgcccgccaaaagctgcagagatcacaaaattcactcccgcctgaaaagtacccgccgttgtcgcaaacgtcccttcacgacaagcgcaataaccgcttcaattaaacaacaaaaacaaaacatatatttaacatcattattccgataaatactgaagaggcccctatgaaacctgaagatttccgcgccgacgcgaaacgcccgttaactggcgaagagtatttaaaaagcctgcaggatggccgcgaaatttatatctacggcgagcgcgtgaaggatgtcaccacgcatccggccttccgtaatgccgcggcttccgtcgctcagctgtacgatgcgctgcacaaaccggagatgcaggattccctgtgctggggcaccgataccggcagcggcggctacacccacaaattcttccgcgtggcgaaaagcgccgacgatctgcgccagcagcgcgacgccatcgccgaatggtcgcgcttaagctacggctggatgggccgcaccccggactacaaagccgccttcggctgcgcgctgggcgccaacccggcgttttacggccagttcgagcagaacgcccgcaactggtacacccgcattcaggaaaccggcctgtactttaaccacgctatcgtcaacccgccgatcgaccgccacaagccggctgatgaagtgaaggatgtctacatcaagctggaaaaagagaccgatgccgggatcatcgtcagcggcgcgaaagtggtcgccaccaactcggcgctgacccactacaacatgatcggcttcggctccgcacaggtgatgggcgagaacccggacttcgcgctgatgttcgtcgcgccgatggatgccgaaggcgtcaagcttatctcccgcgcctcctatgagatggtcgccggcgcgaccggatcgccttacgactatccgctttccagccgtttcgacgagaacgacgcgattctggtaatggataaggtgctgatcccatgggagaacgtactgatttatcgcgactttgaccgctgccgccgctggaccatggaaggtggtttcgcccgcatgtacccgctgcaggcctgcgtgcgcctggcggtaaaactcgactttatcaccgccctgctgaaacgttctctggaatgtaccggcaccctcgaattccgcggcgtgcaggccgaccttggcgaagtggttgcgtggcgcaacatgttctgggcgttaagcgattccatgtgctcggaagcgacgccgtgggtcaacggcgcatggctgccggatcacgccgcgctgcagacctatcgcgtgatggcgccgatggcctacgccaagatcaagaacatcatcgagcgtaacgtcaccagcggcctgatttatctgccgtccagcgcccgcgatctgaacaacccgcagatcgatcagtatctggcgaagtacgtgcgcggctccaacggtatggatcacgttgaacgtatcaagatcctcaaactgatgtgggacgccatcggcagcgaattcggcggccgccatgaactgtatgagatcaactactccggtagccaagatgaaattcgcctgcagtgtctgcgccaggcgcagagctccggcaatatggacaaaatgatggcgatggtcgaccgctgcctgtccgagtacgaccagaacggctggacggtgccgcatctgcacaataacgctgatatcaacatgttggataagctgctgaagtaattcacagcgggaggtcataatgcaattagatgaacaacgcctgcgttttcgcgatgccatggccagcctgtcggctgcggttaacgttgtcaccaccgcaggtgaagccggccgctgcggcattaccgccacggcggtttgctcggtgacggatacgccgccatcggtgatggtttgtatcaacgccaacagcgcgatgaacccggtatttcagggcaacggcaagttgtgcatcaacgtgctgaaccacgaacaggaaatcatggcccgtcatttcgccgggatgaccggggtgacgatggaagaacggtttgccctcagcggctggcagcagggcgcgctcggacagccggtactgaagggttcgctggccagcctcgaaggcgagattagccaggtgcaaaccattggtacccacctggtgtatctggtggagatccgcaatattaccctgagcccgcaagggcacggcctgatttactttaaacgccgtttccacccggtgatgatggaaatggaagtcgcggtgtaatggcctcgcctgcctctccccggataacggggaggggcaacacagattcgcgttagccttcctgctgggcaaactgtgtcagcgccgcgccgccttctggtactttccgcccatcctgtagttcattatatggataggatcgcggcactggcgccgggatctttttaaatagctatattaatggatattaaatcgatgtttaatccataaaccaatgactattaccccgctaacaaacgagccaatctttatactcaaaaacaaataattaacaactgaaacattaatacttcctgtttcgaaataaaaaataaggggcttaataaaaagtgcaaaaaatgaattcaagctcatgattatcatcagaacagtgaaaacagtgagccaacggtaaaaatcatttttcattttcagttctcttccacaaattattagtagttttagagctaccttgtcctgttgcttctgtaatgattgatgatatagcgtttccagatattacaggtatcggtgataaaggtaatggtttgcttatccccttctccatatcattccactcatagttcttccatataggattgagaactttatttaacgggattttgataagatatttacccatcccatagccaattactcagaggtttgcccctgcactcgctccgtaaaagttattctctacaagaactaataaaacgctcctatcacgaggactaagatcgtttaaactggtactatcagtccagatttcttttaggaaaataatggataaaatatattcctatcccaccgactaatcctcctgctgtacctgccttaacgctaaccttcaatatatcaaagagcggaatattaaaacctctcatttcaataatactgaatagactacgaacaataaaaatcccaatggtagtcaccgctataacaagaaatattgtagcaatcaaattgaggaggctacgcatcatttatccccttatcttagatagctggccgctttagaactgccttggccaatgctctcagttgaaccagaagcaataatattccctatcacggcaggacgaggaaccactggtaatggcttacttattcccatctccaaattaacccactcataatttttccatgcaggattaacccatttatctaatgaaattttggcaactttacctattccataaccgatacccgaagcgacaccacttattacgccgcctttaaatggatcatcgccgttcagatagcttgatgcagctccacctgccgcattccatcccacagttcctaaccaactagtttttgaggttgctgctccaacccaagtcgctatcaacgcatctgtgtaattcacttcactagtcgtggcatattgtattgcagtattggctccgccaccgatggctgctgttatcagagccccctttggcaatatacctaacccaacagtacctgccagatgggctgatactactgcattcccttttgccacatcttctgcaagttttcctttacagtctgtatcgcagtctggcgtctggctgtgaatgatttccgccacatacaagctcactgccccgctcgccgcctgcgccaggttgccccccgccagaccctgcatcgccgccgttatcgcctgcgccaccttctggtactttccgcccgtatcgtatttaccttaacttcaacttaaatattccgatagtaaaaaaacacagaacaaaacctattaatattccagaaagagatactttaaaatatgtaaataatttaccaataaaaaacgagagtatattttcccctccgccgatccagtaaccaagcaagctgaatgaaattgtgatggttaacaacatgctaaaaatagcaagacatagatatagtaacacaatgaaagatctacatcggaaattcatcattgttgcaccttattgtttttcagagcttcattcataccctctgtaaatgctccggaagcagctgcattccccgaattacctaagatcgaaggtaatttccgtcacatgcgactcgccgcgccgctcgccgcctgcgccaccttctggtacttttcccccgtccgtagtccgccgtcgccgtccggctcacctgcgcgctgacttgctcctcgctcggatgggtattgcctcccgctacctattacgatttttcttgtagccttggtaataaatccaccaacagccgaccgcgacaattattccagcaaatgttgcagccttactatatttgattaaatcatcaatatgaatttcaaatggtacatcaaacatagcccagaaaaaaaaccttacaccatagagcaatatcacaacaaaaatattcattcccaaagcacatgatgcaagaaggtaaacaaaaactgatagccattttttgaaggtcattgtttattccccatcaatttattggtatcaactttaccagcctgactatttataacttcagtagctaaactagcgccaccattaccaaatgttccgggcaacgggtttatcggtaaaggtttagaaatccccattccgacatctgtccacatccagtctttccatggcttcatcgggttgtaaattttatccataggcagctcaatgagttttcctgcaccataacccaccccagaggccaaaccattaattaagccacctgtaaaaggattatcccctttcagatagctggatgttgcaccacctgccgcattccagctcattgttccctttaatcctgtatttctggtaaaagctccaacatacgtcgcaatgagcacatccgttggattaacttctccattcataagatactggacaccagcatttgccgttccgcctattgcgccagtaatctgtattcctcccggcaggtagattagccccgctgaagccaacgcacctgcataagctttattttcagcaattcctcgctggcaggcttcaccagacgggttatctgcgcatgagagaacatctgcgccatgctctctggctttctcaccctggctccattcgttcccacccatcaggttattctccaccgcgttcttcccggcctgcgcacccgccaccgcatccgcgctgctgcctccgctaagcccccccatcagtcccgccgccagcgtactcagcgcgcttatcgtcgacttctgctcatccgacagctcttctgtcttaacgtccggataatattccgccgctatccagcgccccagcagctcgccgctcaccgcgcctgccgctcccgccagcgcgctgttatttcccgatgccgccgctatcgctccccacaccgcatgcgccatcgcattggcttccacattcaccttacccgtcgcgctgtccgtcgtctggctgtgaatgatttccgccacatacggactcactgcgccactcgccgcctgcgccaggttgccccccgccagaccctgcatcgccgccgttaccgcctgcgccaccttctggtactttccgcccgtatcgtagtccgccgtcgccgtccggctcacctgcgcgctgatttgctcctcgctcgggctggcattccctcccgctaccagcttcgcccgcgccgctgcccgcgccgccgggtcgctctgcgccgcctgcgcgttcagcttgccctgcgtcaccagcacatcactcacctggcgcccgatttcacctatcttctgcgccgtcgccagccggttctgctctttctccttatcaaatatcggactcagcgtttggttcgcatgcgccgcatcccggcttaaccccgtcacgtcctgctgctgattcgcgccgtcgcggataacgatactgccctcgctcaccgccgcccgcgtcagcgaactgtcgctgccgctgccgttcacccccatcagcagtccactggccgcattcccgaggaactgccccgccacgctaccgctcgtgctcacccccgcactctgctgctccacgctgtaatcggcatagtttttaatatcccggaaacccagcgtcccggtatccagccggttcagctccgccgccgccgtgctcgccagcacgctgccattcagctgcgtatgcccgcccaccttcacatcaaaaccaccctcgccggcaaaaatccccgtctgcgcctccaccgacgcccaggtgctgtgcattttgctctggctcaggctaagagaacccgaaccgccgcccatgctgccgctcgcccccacgctgccgctacgctgcttcgaatcgtagttatcgctgtcctgctcgctggtcagcgtcaggttacgcccgacgtccattgtcacctgatggccgctcacctgcgccccggtcagcgtcgtatcgcgaccgctgacgatagtcacccgctcaccggcgctgagggtcgtttcgttatgcgtcaggctgttgcccttctcgtggcccttcccggcgttggcgctggcgctgaccgtcagcccgttcgcgccctgcccgaagttaataccgacgccaaacgaactcccatggctctcgtttttaccgctcagggtgctggcgttctccgcagagaataaattcacatcgcgcgcggcattgagcaacgcgctgccaccggcctgcagctggctgccctcaacgttgatatccgtctccgtggcgataatgctgagattgttgccggccatcaggctgctgccgcggctggtgttctgcgtttgttgctgagtggatttcgaggactggctaccccaggagaggttgacccctatcatgctctccggactggaatccgcagtctgcatctgcgatgcctgatacgcctgtacgcccgataatgccgactgcagcccgctcagcgcggcgagacggccattgctctcggtgctggcctggttggcgctggaaaccgcggtattaatggcgctgcccaccatcccggataacgccagcgtcaggccgctggttttctgctccacggtatgggtctgggtactctggttttccgctgccagaatattcacggttttaccggtcaacgccatattgttgccggccaccaggtcagatccctgaaccgtcaatacattaccggcgctcaggctcaggttgccctgtgagcttccgacggtactggcggcgctactcagcgccgtcgttacatcggtggctttcagcgacgaactgccgacgctgaagccaacaccgccggtgccggaaaagccgctatgtttctctttacgtagatggttttcctggcgatgctcctcggcggtggtgatggtcaggttacgccccgccacaaggttgacgtcctgggtgccggcaacactgctgccggacaccagcaggtcgcgcccggcctgcatcacaatactgtcaccgctaaaattgctgccgatggcgttctgcgcccacacttcatcgtgagtggtgagcgagcggcgagccagcaggccgctgctgctttgatgactgttttccgtcaggtgccatgaggactcgccgctgctgaggttaatatcattgccggcggcaaccgtcaggctgctggtcgccgtcacgctggcggcgcgggcattcatatcgtggccggcggacagcgccaccgcgccgccgttaatttgcgtgccgatatcgctacgctgggtcaaggaacgatcgttgcctttcccccagtttccgctttcgctatgggtggtggcgagcgtctgcagattgagatcgttgccggcgataatctgcgtctggctgcccgccgcgctgttactcaccatacttgccgtcagattaatgttatgtaacgcctgcagccccagctggccgttttccttctgaacataaatccccgcaggccgatcgatgctgatgttacccgggccgccgccgagggtgccggcgctgttgatatcacgcccggcttgcgcgatcaggctatcgccgccctgcagcgttccgccaatattgttgatatcagtacgcgcgtttagcgtaagctggttgccgccgatatagccgctgttatgaatgttttccgcggttagctgcgtcacgccgcggctttggatgtgcccgctgttggtcacatcacggctcacgctgaacgccacgttttcaccgcagagcaacgcgccgctgccatcgagatcgcccgctttaacccgcgcgtaaacctgcggcaccagcacctgctgcacggagccatccgttagcgtgacctctctggcgaccagccagaccatatcgctggtcagcagcgccatctgcgctggcgtcagcgccaccccgaccgtcaggttgtactgtttggcgaaggcgacgcccgcgtccatcagcgcccggtactgctcttcatcgttactgtagccctgcaggtagcgcccgccgctcagcttaacgatctgctcacgcaccagccgctgctcgtaatagccgtcgccaagccgcttcatcgcctgatcaacgcccagctgattttgcatgtagtcgctggcgagccacgctttaccgttggtaaaacgcggatcggtttccaccagatagcctgctttagcctgcggatcgatctgatacagactgctgacaggaagctgggtatccggcgtgacgacgcgaataaccgttccgtcagcgttaaccggcgtcacttccaccagtcgtccggcgggtatttcgcctgtttcatcggcgcgatcgcgcggattaatcacaccgctatggccatcaatttgggtattgccctgccacttcatggtttgcaaatcgatggtctgaaccgtcggcgtcggttcatattcactgctttttttcccctggctggttttggtgccgccaaacgggcggctggtctttttctcataccaacgggtctgggtgccgacgtcggtggtcacccgtttgccggtcgtggcgacgttgtttagttcgccaatcacgccaccgagcgctcctccggcgataatctggctatcgtagttattcagcttatcgctgttgatgatgagctggccgccggagaggattttgccaggatcgctttccaccacctgcgtttccacaacggtacgctggtactgatattcatagaactcatcgccacggctaccgtccggcatgatggcgtcgtgaacgccgtatttgtttttatagctggtatcgaccagcgaccagtcgaagcgctgtaccgatcctttcagcgccgcttcatggcgccatgactgctcgaccatcacatctttcgtcaccagatggtcgttgtagttatttatttgttggatatcgagcgccatatcaccggcggactcaagcgttgcgctgtggttattaaacactcccgcccggccgctgagcgaaccgtcttcggcaagctggccgccaatggcgagcgtaccgtcgctgtagatcagcgcgtgatcctggttattgagcgtgccgacgcccattgccagcgatgcccgtgcggcaatcgtcgccgccacgccgttctccgcggcgttagtcagcgttgccgcctgcagcgcgacggcgtcgccgtacaggcgcccgctgccgatattggttaacgtcgtggcgacaatatgggttaaaccgccgtcaatcagcccccgattgaccaactcgccgctgaccgtcaaatggttctcgccagcgctgatttcaccttcctgacggttatccagcttcgccgcagagagattgagcgcccggccggcgctgataaccccctgattaatcagccccagcccggagagattccactgcaggttgccgttggcgatgatcctcccggcgttatgaaacgcctgacgcaacgtgagcgacatatcgccctgagagagcacctcgccatcgccgctgagggaatcggcatcgaggctaagtttgctcgcggcaagtaacgtcccgcccgtattagccagcgccaggttgacgcctgctatttccagagcggcggcggagacgatctgcccctgtcggttatccagcccccggttgtgaatggtgatgttgagattaccgccggactgcagttctccctgccggttatcaacggtggcgctctgaatacccagggcatcaaaggcggtaattgtgccctgctggttatccagtaaaccgctcgtcgtcaggttgacgctgccccgctgcgccgtgcctatctgcccgtgacgattagtaagattttcagcctggagttggatatcgccgctggcgatgatattcccctgcgagttatccaccccatggcgcgcagtgagctgaatgtcgccctgcgccgcgctgatttttccgccatggttggtaagattgtcggcgtcaagcttgatattgccatttgcggcaatagtgccttcgccgttgtccagcgcgccttcgctggtaatagacatgccgccgctgccggtatgcagcagcgttccgttttgattgagcaactggctggtgctgagcgtcaaagcatggctgttgctggcaatctcaccgccgcggttatccaatcccgcgcgaaaatcaaggcgtagatcgtcctcgcccgtctgctggattacgccctgttggttatccagcgccattgctttcagctcaagctggctggccgtcaacaggccactgtggttgttgagtttgccgctggcggccaactggagtttttcgctggccgccaccaccgcatctcgggtggtgatatccccggacgcggcgctgaccacgatccgcgcccccgaggttcgactgttatcaagatccaccgtcctgccctgcgccgtcagcgttcctgccgccatattgcggccattcagcgccagcgagctctggctattcagcgtcagcgcgccgctgctggcggtagaaccatcgctatttaatccggcggcgagcgtgctgttttgcgcgctgcgcaaagcgttggcggcaatctgcgtatcgccttgcgcggcgatcatgccgtcattggttagcgtcgcgctggccgtcaccacgctatcttttccggcgtacagctgcccctggttgtgaagatcgcccttaacggacagttgtagattctgcgcggactgaatcacgccgctgttgctgagcgcgccatcagcgctgattgctacatcccccgccgccgcgccgatattgccggcattgtgaacgcctacgccgcgctcggtaccgacaagacgaattttatgggcgtacatcccgcccagggcgctgacgtctatcgccaccgcaggcagcgcactgccgtcggctgattttgccgtcgttcggctgtgcgccgcatcgatctgattacgccctgcggtgacctttagctcctgcgcccaaaccccggcgttgattttcaccgcgcgggcgagcaggtcggtactgtctaccgagctcgcatcaaggccgccgccctgtacgataatttcgccgcgattgacatcataaccactaatctgcccgttaccgtactgcacctggcctgtcgtcagcgtcgcgcggttggcattgatgaacccgcagccatcgcagctaattccggcagggttagcgataaccacctgcgctttttgtccggcaacctcgatatagccattcagccggctcggatcgcgggtattcacctcgttgaggatcactctggcttcccctttcgccagattcgggttgccggcgaccatcccggccagttgagttgaagtgttagcgtggctgttattcagcaccacgccgcgcccatcgacatcaaactggctgtagacgttgcgtgaaacgcctgcgccgctcggtgtctgaatattgacctgcggcgtgccattggcgctattggcgatctgcggttgctggccgccgggcgcatggttatcggcgacaatcgctgccttagccggggtaagacaggaaaaagcgagcagaaagctaaaagccagcggcgccagggaggagattaacgtcgacccggttcgcgcgtcggcgccggattgcggcgacacaccagcccgatgagagcgggtcgtttccgccaccaccatcagcatcccgcgagccttattaaatacgattcgataaaagagtttattcattgccgttactcgtcatccgttgtccaccgcggcgcggaagatcgtccatgtgcgcagcacgcgccgccgggcggcgcgtgagtaaagtcagtagctccagctgacgctgaaaccaaacgtcgccgggtcggttttaaagccatcgggtttagctaaagggataccggcgaacaggtcgtagctggcgcgctggtactggccgcgcagccctgccacgcccccggcgaggtgtttgcccaccagcgtttcactgcctgcgccgccgacttcgccgtaatccgcccccagataaaactcctgccccggcaacggagtcgaccaggcgatatcgttacgtacgtaccagccgtgactggcggtcagggtgcgctcgccgtcaaagccgcgtaccgtccagcggttgccgatggaaaacatatccggcgaagtcagcggcgtgctgctcatctgccgctgatagcggctggtaaagcgaaaattttgcccgcccagggcaaaaggcaaattgagctgagcattgaattgcaggattttgctgagggcggttgcttccctccattgctcttccggcgcgggttgagcgccaaaccagcgggtaccgcgctgatagctcactccggcatcgagagtggcgttgcccaggtaatggcgatgctgcagaccaagcttccaggccgccgtctgccgccgctggacggcaatctcggtgtcgttaatgaagttgcgctgctcgcgggccaacacatcggcgctaagcgtggtcttctgactaccgctacggtgcagcacgcggctaagctggaaatcaacgttcttgcttttaccgctgtactggtaatcgccgttggcccccgccacggtttgcacgtaatcgtactggctggcggttaatccgagctgccagtagcccagcgggatcgaatagtggccggtcaggttctttgaggatttaccgccgttgccatcgaggttatgtgaaccggaaaggtaaaaaagatcgcttaaggctagcgggttatccagtgatagcgtcaggttaccctgatagcggccggtggcattagagccggagtcatcaagcgaggcgtcaacgcgccagaagcgttcctgtcggcggttaataacaatatcgctttgcccaggcgtttcgcccggaacaatttccatgctggcctgtaccgtcggcaggcgctgcaagttttccagcccctgttcaatatcgcgcagatccagtagtttcccgtcagtcgccggaaatgcgctcgccagccacagataatcatcactctgcgccgtaagcctggcttcacggatataacccggcatcaccaccaggcgcaaaacaccgctttttaaatcctgctgcggggcaaggatccggctggtgatataaccgcgatcgattaatatattctgcaactgggccatcagtagattaatgccctttcctcccagacaacgcccaatcgctttatttgtctggcgctggagcggaagccaatgcggtaaggcttcagcaccctgcaaaataacctgagaaataacaaagcaaggttgttccacgggaaataaaccatcatcggtatttatttcttccgcggataaatgaatatccggtgacggcggcgcgagctggttttccagcgcctgctggcgctgctgctggttgatgaactgctgctcacgtacggtatccacaggcgcggcataaacccaaacagggagcgcagagataataaaaactttatgaattaagttccatttattcataattattaaagccaaagccatccatgttggatacaacgaaaagttatagcatttaaatacattcaaacgtgtataaatatcaactcatattaataaggtaatcaccgcaacaataattcagcggaaagttcatcaatggcaggctatttttatcggattagtgaatatatttcagtaaccgacgtaaaatgtgaagtcattatgaaatgagaaaaatgagtttgaattgatatattctgacgcaggtatgcctcgcgacacacgacaataccccgtgatctcaatcacatatttccctcttgctcacttcatagccaaccgcttaccccggctagcgaccgcttaaccccgcatataaccactcaccgatttacccaactttacgcgcgcggcgttctggcaagatcggaggcagcctagctaatcattacctccaccaacccaaacacaaaaccagacggcttcggccaattattaatctaattaacgccaggttttactatggataccaaaaaactactcaagcacataccctgggtgattctcggaatcatcggggcattttgcctctcagtcgtcgcgttgcgccgcggtgagcacgtcagtgccctgtggatcgtcgtcgcgtcggtttccgtgtacctcgtcgcctaccgttattacagcctgtatatcgcgcagaaggtgatgaagcttgacccaacgcgcgcgacgccggcggtcattaataacgatggcctgaactacgtgccgaccaaccgctacgtgctgtttggccaccatttcgccgccattgccggcgccggcccgctggttggcccggtactggccgcgcagatgggttatctgccgggcaccctctggctgctggccggtgtggtgctggcgggcgcggtacaggacttcatggtgctgtttatctcctcgcggcgtaacggcgcttcgctgggcgagatgattaaacaggaaatggggccggtaccgggttctatcgccctgttcggctgcttcctgattatgatcatcatcctcgcggtactggcgctcatcgtggtgaaagcgctggcggaaagcccgtggggcgtctttaccgtctgttcgacggtgcctatcgcgttgtttatgggtatctacatgcgcttcctgcgtccaggacgcgtgggtgaagtctcggttatcggtatcgtgctgttggtggcatccatctggttcggcggcatcattgcccacgacccgtactggggcccggcgttgacctttaaagataccactatcacctttaccctgattggctacgcgttcatctccgcgctgctgccggtatggctgattctggcgccgcgcgattatctggccaccttcctgaaaatcggcgtgatcgtcggcctggcgctggggatcgttatcctcaacccggacctgaaaatgccggcagtgacccagtacattgatggtaccggcccgctgtggaaaggcgcgctcttcccgttcctgtttattaccatcgcctgcggcgcggtctccggtttccacgcgctgatcgcctccggcaccacgccgaagctgctggccaacgaaaccgacgcccgctttatcggctacggcgcgatgctgatggaatcctttgttgcagtcatggcgctggttgcggcctcgattatcgaaccgggcctctacttcgcgatgaacaccccgccggcaggccttggcatcgtgatgccaaacctgcatgaaatgggcggtgaaaacgcggcgatgatcgcagcgcagttgaaagaagtgaccgtccacgcggcggcgaccgtcagctcctggggcttcgtaatttcaccagagcagatcctgcagacggcgaaagatatcggcgaaccttcagtcctgaaccgcgccggcggcgcaccgacgctggccgttggtatcgcccatgtgttccataaaatcatcccgatggcggatatgggcttctggtaccacttcggtatcctgtttgaagcgctgtttatcctcaccgcgctggatgcgggtacccgcgcaggccgctttatgctgcaggatctgctgggtaacttcgtgccgttcctgaaaaaaaccgactcgctggtcgccggtattatcggtaccgccggctgcgtcgggctgtggggctacctgctgtatcagggcgtggtcgacccgctgggcggcgtgaagagcctgtggccgttgttcggtatctctaaccagatgctggccgcggtggcgctggtgcttggcaccgtcgtgctggtcaagatgcagcgcaccaaatatatctgggtcaccgttatcccggctgcgtggctgctgctgtgtaccacctgggcgctgggcctgaagctgttcagcagcaacccgcagatggaaggcttcttctttatggctcagcagtataaagagaagattgccgccggcggcgagctgaccgcacagcagatcgccaacatgaaccatatcgtggtcaacaactacaccaacgccggcctgagcattctgttcctggtggtggtgtatagcatcatcttctacggcatcaaaacctggctcaatgtccgcaacaataaggtgcgtaccgataaagagactccgtacgtgccggtaccggaaggcggcgtgaagacctcgtcacatcattaatcctgatgccggatagcgctacgcttatccggcctacaaaaagcacattaacgtaggccggataaggcgcgagtcgccatccggctttattcgttatctggaacttacaatgtttggtaacttaggtcaggcaaaaaaatatctcggtcaggcggcgaaaatgctgatcggcattccggattacgacaactacgtcacccatatgcaaaccaaccatccggatcagccgtacatgacttatgaagaattcttccgcgaacgccagcaggcccgctacggcggcgacggcaaaggcggcgtacgctgctgttaatggaggcaataatggcaccgattgcagtcaccctattaaccggttttctcggcgcaggaaaaaccaccctgttgcgccacatccttaatgagcagcacggtttcaaaatcgccgtgattgaaaatgaatttggcgaagtgtccgttgacgatcaattgatcggcgaccgcgccacgcagattaaaaccctgaccaacggctgtatttgctgcacgcgctcaaacgaactggaagatgccctgctcgatctgctcgacagccgcgatcgcggcgagattgccttcgaccgactggtgattgaatgcaccggcatggccgacccagggccgattattcagacctttttctcccacgaggtgctttgcgaacgctatctgctggacggcgtgattgccctggtcgacgccgtccatgccgaccagcagatggatcagtttaccattgcccagtcgcaggtcggctacgcggaccggattctgttaaccaaaaccgatgtcgccggcgacaccgaaaagctgcgtgaacggctggcgcgcatcaacgcgcgggcgccgatttataccgtcatccacggcgatatcgatttaagcctgctctttaataccagcggttttatgctggaagagaaggttgtcagcgccacgccgcgctttcattttgtggcggaaaaacaaaacgacgtctcgtcgattgtggtcgagctcgactatccggtggatatcagtgaagtctcacgggtgatggaaaacctgctgctctccttcgccgagcaactgatgcgctataaaggcatgctgtggatcgacggcgagccaaatcgcctgctgttccagggcgtgcagcgcctctacagcgccgactgggatcgcccatggggcgatgaaacgccgcacagcacgctggtgtttatcggcattcaactgccggaagaagaaatccgcgccgcgtttgccgggctccgtaaatagccgccgcaaggaagaatccctcccccgatgggagagggattcttcatgatggatggtttagcggcgaacgaccaccagcttctgattcacaaactctttgataccgaggtcggaaagctcacggccaaagccggagcgcttcacgccgccaaaaggcagctccggcgcggtatccgttaaccagttgatatagaccatgccggtttcaatccccgaggccatacgtttcgcccgctcaatgtcctgactaaacaccgcgccgcccaggccgtagtgagagtcgttggcgagcgcaatcgcctcatcatcgtctttcaccacgtatatctgcgccaccgagccaaagaactcttcgaagtacgccgggttctcacgtgtaattcccgtcagaatagtgggttcgtagaaattaccttcgccggaaaccggcttgccgccgaggtgtaatttggcgccatgcttcaccgcctcgtcgacctgtttacttaaggtttccagcgcctctttcgaggagagagggccaagggtggtgctttcatcgagcggatcgccgatcttcacctggcggaaggcatcgctaaacttgctcaggaacgactcggcgattttttcatgcagaatgaagcgtttagcggcggtgcaaacctgcccggcgttgttcagccgcgcctgtacgcctattttcaccgcgcgttccaggtcggcatcgtcgagtaccacaaacacatcattgccgcccagctccagcgtcgctttcttgatatgtttcgccgcctgcgacgccacgatgccgcccgctttttccgagccggtcagcgccaccccctgcacccggtcatccgcgataattttcgctacctgatcctgagagataaacaggttggtccacgccccttccggcgcgccagcctcgcgcaccagatgcgcgaaggtctcggcgcattgcggaacgatgctggcatgtttagcaataaccggattaccagccgccagatttggcgccagcacgcgcattaactggtaataggggaagttccacggctccaccgccattaagacgccgatgggatggtgttcaacccaggcttcgccaaggtcggaggaatacttcaccggcgccaggaaccgttcggcgttgtcggcataatagcgggcgatctgcgcgcagagtttgacctcgccgcggctctgtttaatgagcttgcccatctcctggctggcgattttcgccagctcctccgcccggctgtcgataaggtcggcaagcttatgcagcaccggcagacgctgcgcaatatcgcctttcgcccacgcagaatgataaagcgcatctgcctgccgcagcgccgcctccacgtcagcatcgctgtgtgcgggatagcttttaataagctggttattcgcaggattcactgtctgataagccatatcgcatgtctccttgttatcgctattaacgcagtcaaaaatgccgctaaggatattaagggtagtcgagatagctgacgacgcgggtaaagttaggtatatccggaatattccatgagaatggatagcaagggcgccttgagggcgccccggcataacggctttatcaatgtggtaacgtggctatctcttcggcagccagaccggtgatcttcagtacggtttcaggtgcaataccgtcggcaagtatcatcctcgcaattcgctgcgcctcggcgtgctgcccttcttgccatccttcaagccgcccttcacgtttgccttttctgcggccaacttcctgtaatctttcggcgatggtcataaatctctccctatgctgaggaacccgatgcgcgacttcgcgaataaaccggccgaagcggcgcacgttgccagtttgcagcaaataattaaataacgtttttagctgcctgtcattagcgtaaccgctaagtaaaattgatccgcgcgtagaggaagttgtgccgatttttgcatgacctcgccgtcaggttatatgcttaaccctatggaaaaactcgctgaattaaaacgcgccaaactgctggcgctgtcgctgctgctgattgcggcggcgctgtttatcactacgctgctgctaccgccgacgccgtgggtcagcgcgctgaaggctatttccgaagcggcgatggtcggggcgctggccgactggtttgcggtggtggccctgtttcgccgaattccgctgccgtttgtcgcccgccatacggcgatcatcccgcgcaataaagaccgtatcgccgataatcttggccatttcgtgcaggagaagtttcttgatactccctcactggtggctctgatccgccgctacgaaccggccttgatgctcggtaactggtttagccagcccgaaaacgcccgccgtgtgggccaacatctgctacaggtgatgagcggttttctcgagctcaccgatgatacccgtattcagcgtctgctgcggcgcgcggtgcacaaggctatcgataaggtcgacctgacgcaaaccagcgccatgatgctggagggactaacccgcgacaaccgtcatcaaaagctgttggattcactaataagccagctgatcgccctgctacagcgcgacagctcacgtgtctttatcgcccgcggtatcgtgcactggctggagaccgaacatccgctgaaggccaaactgttacccaccgagtggcttggcgagcacagcgccgaaatggtcaccgacgcggtaaatacgctgctcgatgaggtcactcaggaccgcagccaccagattcgccaggcctttgaccgcgcggcgcagaagcttatcgacaatctgaaatccgatccgcaaatggcgcaaaaagccgataacatcaaagcgtatctgaaaaacgatgagacctttaatcgctatctcggcgaggtgtgggcggatctgcgcggctgggtgaaaaacgatatcagcagtgacgattcgcgcatcaagcagcggatcgccgaggctggtcagtggttcggcgaaacgctggtgcgcgacgacgcgctgcgtgaatcgctgaatgagcatctggagcaggcggcgcatcgggtcgcgccggaattcgccgccttcctgactcgccatatcagcgatacggtcaaaagctgggacgcgcgcgatatgtcgcgacagatcgagctcaacatcggcaaggacctgcagtttattcgcatcaacggaacgctggtcggcggcactatcggcctcggcctgtggctgttatcgcaaattccggcgctgctgcatctgcatatcggctgacaatggtagcatcataaccattctaacgatgaatacccgacggcaaggagacggctatgtcatggatttcgcgattgagcgcccgctactgcgcatcgctgttctttccgatggcgctgatcctgtacgatttttccgcctacctgaccaccgatctcatccagccggggatcctgcacgtagtgcgggattttaacgccgatgtggcgctggctccggcctcggtgagcctgtatatggccggcgggatggcgctacagtggctgctggggccgctttccgatcgtattggccgccgaccggtactgctgagcggcgcgctgatttttaccctcgcctgcttcgccaccctgtggacgacctcaatgacccagttcctgattgcccgttttgtgcagggcaccagcatctgttttatcgccaccgtcggttacgttaccgtgcaggaggcctatgacgaaaagcggtcgatcaagctgatggcggtgattacctccatcgtgctggtggcgccgatcgtcggcccgctgtccggcgcggcgttgatgcattttatccactggaaagcgctgtttggcattatcgccgcgatggggctgctggcctggctgggtttactgtttaacatgccggagacggtgcgtcgcggcgacgtgccattcagcccgctcggcgtggtgcgcgattttcgcgacgtctttcgcaaccgcatctttttactcggcgccgccacgctggcgctgagctatattccgctgatgagctgggtggcggtttcaccggtgattttaatggacgccggcgggctcaccaccagcgagtttgcctggagccaggtgccggtcttcagcgcggtcattatcgctaatctgtcggtggcgcgctgggtgaaagacccgactcgctcgcgctttgtgttaagcgccgtgcccatccagatggttggtctggcgatcctgattatcggtaatctgacgtggccgcacgtctggctgtggtcggtgctcggcacctgcttctacgccttcggcatcgggctgattttcccgacgctgttccgctttaccctgttttccaacgacttgccgaaagggaccgtgtccgcctcgctgaatatcgtgatccttagcgtcagcgcgttatcgattgaaggcgcgcgctggttgtggttccatggcggcagattaccgttccacctgctggcggtagccgccgggatcgtcgccgcctgctgtctggcgggattactccgtaatttgcgccagcgttcagagacagtcatcgaagcccggcaatcctgaatttaaagaaggtctattaacgccgtcaggatgggcgggagatcaataaacacacacaaacaacgtggttataatagcgactctttcatcatctcccgtgtacggggaaggaaaatcatgtcgcttatcaccgatctacccgccctcttcgatcaattctcagaagctcgccagaaaggctttctcagcgtaatggaactcaaagagcagaacgtgccgctggtcggtacctactgcacttttatgccccaggagatagccatggcggcgggcgccgtggtcgtctcactgtgttccacttctgatgaaaccatcgaagaggcggagaaagacctgccgcgcaacctctgcccgctgattaaaagcagctacggcttcggcaaaaccgataaatgcccctacttttatttctccgatctggtggtcggcgaaaccacctgcgacggcaaaaagaagatgtacgagtacatggccgaattcaaggcggtacacgtaatgcaactgccgaacagcgccagcgacgccgcctcccgcgcgttgtggaaagcggaaattaagcgcctgcagcaggtgattgaaacccgcttcgccacgcccattagcgaagcggcgctgcgtgaagccatcgtgctgaaaaatcgcgaacgccgggcgctggccaacttctatcgccttgggcaactcaatccgccggcgcttagcggcagcgatattctaaaggtggtttatggcgccacctttcgcttcgacaaaaccgcgttgattgacgaactcaatgccatggcggaaaacatccgccgacaatggcaggagggaaaccggttagcctcccgcccgcgcattctgatcaccggctgcccgatcggcggcgcggcggaaaaagtcgtccgcgctatcgaagaaaacggcggctgggtggtgggctacgagaactgtaccggcgcgaaggccactgagcgctgcgtggcggaagatggcgacgtctacgatgccttaaccgataaatatctcgccatcggctgctcctgtatttcacctaacgaccagcgcctgcaattgctaagccagatggttgaggaataccaggccgacggcgtggtcgatgtcattctgcaggcttgccatacctacgccgtggaatcgctggcgattaagcgtcacgttcgcctgcggcacgacattccttatatcgcgatcgaaaccgattattcgacggcggacttcggccagctcagtacccgcgtcgccgcgtttatcgaaatgctataaggagcaagcgtgatctactcggtaggtattgattccggctccaccgccaccaaaggcatcctgctggcagacggcgccatcgtgcgccgtttcctcagcccgacgccctttcgccccgccgatgccattcatgaggcctgggagacgctgcgcgcggacctcgcggcaacgcctttcttaaccctcaccggctatggtcgccagttggtcgattttgccgataaacaggtcaccgaaatttcctgtcacgggctcggcgcgcgcctgttggcgccggaaacccgcacggtgattgatatcggcggccaggacagcaaagtcattcagctggatgcgcagggcaacctcagcgattttctgatgaatgacaaatgcgccgctggtaccgggcgctttctggaagtgatttcacggaccctcggcgccagcgtcgaccagttggacgccattaccgaaggtgtagaaccgcacgccatcaccagcatgtgtacggtgttcgccgagtcggaagtcatcagcctgcgttccgccggagtcgcgccagagtcaattctggccggggtgatcaacgccatggcgcggcgcagcgcaaactttattggccgtttatcggcgcagggaccgctgctgtttaccggcggcgtcagccactgcgtctccttcgcccgcatgctggagaagcatgttggcatgccggtcgcgacccatcccgacgctcagtttgccggggcgatcggcgcggcgctgatcggccagcgccagcggagacgcgaatgagcaaatatctattcttattccattcaacggcgggcgtcgtgcggatgcgcaaagccctgcaggcggcagcgatgaccttcgaggtgaaggatattccccgccagctgcgcagcggctgcgggttgtgcatttacctgagctgcatgccgggcgatgagcaacgatgggttatacccggcgaaacggcagccctgtttcgcgtcgccggaaatgactatcacctgttggcgaactatgcgcaccgcggtagcccggatgagacgtaagccgacatccgggactcttccccggtagcgcttacgcttaccggggctaccgaccaaatgcccaacagctacccgggggctggcagcttagcctcagcccaacagctggcgaacgcaggatttgaatacccgcacgccatccgccagcgcggcgcgatcgaaatgcatctccggatgatgcaggcccggctgcaggttgcagcccagcccccagaagccgcctttcaccgccgggcgcaaacgcagatagtgaaaaaagtcttcgctacccggcgtacttttcgcggccgttaagccagcctcgccaaaggtttcgcgaatcgcctggctcacgatagccgtggcgtcttcatcgataatcgccgccggcatctctttgacgatccggatatccgcactggcgccatatgctgcggcactgctctcaatcgctctcaccacccgctctttgagcgtcgccatgccgtcattttcctcacagcgtagatcccaacagacgtgcgcgttctccggcacagagttggtgacgcccgcatcgcaaagaaaacgcgtcgctttcgcgctccaggtgagtgaaggcgccagatggatgccattcaccgcctgtaccgcatgcgaagcggcatccaacgcgtttatgcccagatgggggcgagcggcgtgggcggctttgccgtggaaatcaaccatcaccgtcgcggaggctgagtagtacatcgccggaacggccttgcccatcggacactcttccagtggccggaggtggaagccaaataacatttccacgtcatccagtaccccggcctccgttaacgccatcgcccccgtccccagctcttcggcaggctgaaacaacacttttaacttgccgcgttttaccagcctctcggcgaggatctcttcagcggcggttaataccaccgaggagtgaccatcatggccgcaggtatggcgggcctctaagcgcccatcgataatatggcccagcgcatccatatctgcccgcagcgccaccacaggccctggttcgccgctatcgagacacgtccctttttccgaaaattcatcagaatgcatgcgccttacttatttatctttttttgtggcatatcgatatcttatttttggcaaccactgcgactactgccttattttcatgatggtttactcccgttttttctccttttctattttctgcacgaataatgattatctataactagccgggaagccgatattgtggggatctattatgactgagtttgccgcccgggaagcgatagcccacggcattttgcgggctatccctggcgatcatcccattgccagcagggcctgacgatgtgacatcattcactcactacaaagcgagtcggcgcgaagcagttcagtacccgatggaccagaaacaccatggtcagcgtcgccaccagcgataccgtgactgaagtaatacggtacagatcgctgaacaccagatcctgattcggatgcagattctggccaaacataataccgatagtggtgatgctggcgaatcccacgcccgcgcccactttttccatcacgtgcaggcgggcgctaaaggccagaccaagaccaatcagcggcatcatcaggatcatgtggttgctgaaatcatagataatcagctgcaccaccagaatgtacagacaagccagtaccacccccgccacacgccagatcgagctgattaccgcgccgcgataatgcatcgggaacaggatcagtaccccggccatcagcgccgatagcgaatcgctcagatcgcagatctggaagatcacaaagataatggtcgcaaccgtgccggaaagcagcgattcatggcggatccgcgcggcgtctttctctatgcgcggcggcggcttacgcggttcgacatccgggatcaggtagtgcagcagcgcgctcagcgccaccgccatcacgcaggcctccatattggagaacatcagcgtgtgccagttgctggtgggatagctcataaaattgagcatcgtgctctggcacaccacgcccatcgaacccagcaggaacagcggcccctggctcatgaagcgaaaacgcatcacatacaggccgaacacaactaacgtcatgatcaccggccactgcgacagatagccaacgatgagcaccatttcgacgcaattgaccgccgcgctgaacacaaactgccgggcgacgtggcggttgaacaccggcaccaacgacatcagcatcagcggataaacgacgaaaaacacgccatactgcacgtcgtagaaggtcgaaatactcagcgcgatggtcccggcgacggcaatgcgtaccgtctgacgaaaatcattggccgtatagacgatattgccgtgcggggtaaagacgtgcgccagggtgttaatagacatagtgcaaccagctcaccaggtggatctgcaggccggcaaaggtgcgggcgaaagggccgtcgctattgtacaactggacggtggcgcgggcgccggtcggcagcggcttatccagaggttgatccagcgcgacgtgaatccgcatgcgctgcgcatcgcgcacccagcgggtagactgctcaggctgcgacagttggccattcaccgcttcctgaccggcaagaataccggcgtcgctgctggtcacgtgcgccgggaacactttacccggcagggcatcgaaaaccaccgccgcgtcggtattcaccgccgtgtggcgcaggcttttttcacgaaagtcggcgacgatatcggtgttgttgttaaccagcgccagcacggcggtggcggcggtggcgtaaattcccgggttaagctgcaggttgctgaccataccgtcggtctcggcgcgcacctgggtccagccgaggttgagctgcgcctcttccagcgcgttgcggtatttctgcagcgtcacgttgcgcttgtcgtcgcgctcgccgcgctggatcagcaggttctgaatttgcgcattcagggcgctgaccgattgttcgctggtctgccatgtcgtgcgcaccttatcgagatccgattgcgacacgttttgcatggtgctcaggcgctggtagcggtcgagggtgactttgtcattacgcgcggtgtactgcgcggtgcgcaggttggcgcgagcggcggcgatttgcgcatccagctgctggttgctcagtttggcctgttcaagggcgatttgcgccgcttcaactttattaatgaatggcgtgggatcgagctcatacagcaggtcgccttttttcacctggctattgttgtgcacgtagacgtgcgagacgtagccggagacccgcgacgagaccggagtcaccacgcgcatcacggtggaatccggggtcagtgggatccagatatcggcaacgataaaccaggcgaatatcaccaggaaagcggcaatacttacccttacccagcgggcaaatttttgttctggcgtcatcatagtgttttagatcttgttatcttcttcgcggattgtccgcaagttgcaggcgatttgatttaacgtggcgctgaaggtgtcgagatccgcatcggggatggtttccgtcacgcgccgttgataagtctcaatgacgcggttcagcttttccaggatggtacggccttctgccgtcagcgtaagcaggcggatgcgcttgtcgtatggcgatgttgagcgcagtagatacccctgcttttccagctgcgtgagggtgcgcatcagcggcggcagttcaataccctgcacttccgccagttcgcttaccgagacgttgcaccccagctgatgcagctgcatcagcaccgtccagcttgactgggtcaggccggtatcggtaatggcgctgtcgataatcgcgcgccactggcgcaccaccatcgccatgcgcatccccatcgggcggcgggcaaacagttcgtcttcggtcatgttactttcctcacttagctgtggggaaaataatacttatcagggtaagtatcaagaaacgaaggatgtagaagcatcaattgataaattttgtgaatgtaattccccggtggcgctgacgctcaccggggctgccaaaaagcactttttaattaatctgatcccggcgcaacccgacatctttcagctgttcgtcgctcattcgctgcaatattttgcgcgtttgcccacgaagccaccattttttaatcgctcgcaccagaaatacccagccgataaacggctgttttgcccgattctcgtgaaattccatcctctacctcctcgccttgccagaggctttatcttcacggatccgggccagaacaatacagattcacaaaacacttttctttaacatacagattggctaaaacgtacaccatgccccatttttgaccgccatctgtactggtttatctatctgtatggcgataattaaggatacagcatgacccgttatcaacatctggccagcctgctggctgagcgtatcgaacaagggctgtatcgccacggcgaaaagttgccgtcggtgcgcaacctgagccaggagcatggcgtcagcatcagtaccgttcagcaggcctaccagacgctggaacagcaacagctgatcgtgccgcagccgcgctccggctatttcgtcgccccgcgcaaagcccaggcgccggtgccgccgatgtcgcgcccggtgcagcgcccggtggagatcacccagtgggaccaggtgttgaccatgctcgatgcgcgcaacgataaatcgatcatcacctttggcggcggttcgccggacgtcacccaaccaagccttaagcctatctggcgcgaactgagccgggcaattcagcacaacctcagcgaagtgcttaactacgacgagctggccgggcgtcgcgaactgcgcgaacagatcgcccgcctgatgctcgacggcgggtcagtcgtcaccgccgacgatctgctgatcaccagcggctgccacaacgcattatcgctggcgctgctatcggtgtgtcatcccggcgatatcgtcgctgtcgaatccccctgctactacggcactatgcagatactgcgcggcctggggctgaaagccattgagatcccaaccgatccggaatccgggatcagcatcgaggccttagagctggcgctggatcagtggccaatcaaaggggtgatcctggtgcctaactgcaacaatccgctgggatacatcatgcctgacgcgcgcaaacgtgcggtgctgtcccttgcccagcgccacgatatcgtgattttcgaggatgatatttacggcgagctggcgaccgaatacccgcgcccgcgcacgattcattcatgggatatcgacggtcgggtgatactttgcagctcatttaccaaaaccatcgcccccggcctgcgcatcggctggattgcccccggccgctactacgatcgcctgctacagatgaagtacgccgccagcggcaccaacgtcccttccacccaactggcggcctgtaactttattcgcgaaggccattaccaccgccacgtgcggcggatgcggcagatctatcagcgtaatatggagatctatacctgctggctgcgggagtttttcccctgcggcatctgcgtcacccggccaaaaggcggctttatgctgtgggtcgagctgccggagcaggtagatatggtctgcgtcgccaagcagctgtgtcggctgaagatccaggtcgcgccaggatcgctgttttcggcatccgggaaatatcgtaactgcttaaggatcaactgcgccctgccgccgatcgagaagcataaagaggtgatggtcaagctgggggaagcggttaaggtggcgatggagtgattttccgctgacgctgtactcaccggagcgatgggtttatcaccctgcgccagttcgttgccaggcaagagattgctatcttcttctctgctcagtcgaagtgctggcgaaaatagtaagagttattgataattactatgggtgtatctcgcggatcgccaatttaattatacttggcataatatgctgcaaaataagcaggtgagcagtaaaaatcaggaaattagctatagtgaataagacaataaacaaaaaaacattagatacaccactttattatatttaatacaaccaagtataaaattttgattttaaataataatcaccgcaaacactcttaggccactcataattgccttcctgcgatattcccgatacattcaccctttccccgacgggaaataccaaataaaaaaacacaacaatattaccgggatgaatctaatgaaaataaccaaagatcgggtggtttacgccatgtcgcgcgataacgttcctgtcgccaccgtcaacagtggaagtgaagtgctattcgaaacctgcgactgcttctccgaccaaattacctcagccgatgccgtctttaatgaactggactggcagcgcattaacccggcgaccggccccgtctttattgaaggcgcagagccgggcgattgcttaaaagtcagcatcaaacgcatcaccctgacggctcaacaggcggtgatggtgaccgcgccgcagctcggcgtcattggcgatgaactgcatgagcccacggtcaccatcgtcccaatcgtcgaggatcatgcggtcctcccggggaacgtgcgcgtgccattgaagccgatgatcggcgtcattggcgttgctccagcaggagaacccatatcctgcggcacgccggatagtcacggcggcaatatggactgcaaaatgatcgccgccggcagcacgctgtggttgccggtcaacgtgcccggcgcgctattcgggctgggcgatttacacgccgcgatgggggatggcgaagtgtctgtctgcggtctggaagtgccgggcgaagtcctcgtcgagttaaccgttgttaaaaaccgtcagctacccttaccgatgctggaaaacaacgaaacgattttcaccctcgcctccgccgttaccctcgacgatgcggcagcccttgcggcacgtaatatggcccatttcatcgccgacaataccgcattaacgctggctgaggcgatcaacgtgctgagcatcgccggagacctacaaatttgccaggtcgttgatccgctgaaaacctgccgctacgcgctgccgaaaacggtcgccaaacagctttctctgtcgattgatgggggcaagcatgagcgttgaacagttcggctataaacaggagctccatcgagcgctgaccttccgcgatctgctggtttacggcatgatttttatggtgcccatcgcccctttcggcgtcttcggctacgtctgggatggcgcgcagggcatggtggcgctggcttatctgatcggcatggtggcaatgtttttcaccgccatgagttactggtcgatgtcgcgcgcattcccggtttccggttcggtatacgcttacgctcagcgcggaatacaccctatcgtcggcttttttgccggctggctgatattgctggactacattctggtgccatcgctgctgtatatcgtcagcgcggcggcgctggggccgatgctgccgggcgttccgggctgggtctggattatcggctttatcgcgattaacagcctgattaacttacgcggcattacctttaccgcgcgagcgaataataccattttggttgctgaaatcgtggtgctcactatttttgtggtgctgggattgattgcactttattccggagccggggcaggccacctgacgctcgaccccttgtataatgccgataaattcagcctgccgctggtgatgggcgcagtctcgattgccgtactctctttcctcggcttcgatggtatatcgacgctgtcggaagaaaccaaaggcggcgtcgataccgtcggcaaggcctcgttaggcgccctgatgctggtgggtacgctgttcattgtccagacctggattgccgcggatctggcgcagggtatgaaatttggcagcctcgataccgcgttctacgacaccgccaatctggccggcggccaatggctgaaatacgtcaccatgtggtccacggtgatttcctgggggatcgccaacgcgctggttgcccaggcggcggtttcacgcatcttgtttgcgatggcccgcgataagcagctcccgcagctgctggcgaaggtgcatccacgcctgaaaaccccgtatgtcagtaccttatttgtcgcgctgatttcactggtttccggtctctggttctacggcgatatcgacaacctcagtcggctggtgaacttcggcgcgctgatgggctttctggtgctgcacgtggcggtgatcaaccactatctgatccgccaaaagtcgcgcaatctggtgatgcacctgctcttcccggtgattgggctgtgcattatcggctttgtcatttatgagatggatgttgaggccaaagtgctcggcctgagctggctggccgtcggcgtggtgtattacgccattatgcgtctggtgcttaagcgcaacgtggagctgaatctggaagggtaaacatcaccgggcgtcgggctcgccgctatttgcgggcccggtagcccctgagtatttccccgctcgcgctgcgcttagcggggctactggttcacagccgtttacgggccggtagcccggaaaaggcgcggcaagcgccgcctccgggagcctctctatcactcgccaaaaaacgccatccccttatacggctgctcgcggcaggcggccaggcgctgggcgaggttgccaacatgtagctccagcttgtggccgtcggggtcgaggaaatagtgcgattcgccttcgctacggtttagcttccataccgctacgccagcgacctcaagacgggcggcaaagctggtgaaatccgcctcgctgatgctaaacgcataatgggtgtagtcgctctcctccggcggagtgacgcgccgctgcggatccagcgacaggcacagccacagatcgccgcaggaaagatacgcgccgctatcccagcgcgcgtgcagcgtcatgccgagtagctgatgataaaacgccacgctcggcgccagctggctgaccgccagggtcagatgatttaatccgctcaacatatctgttcctccggtgagatgcgctaaccatacccaatcccaccctaaaccaccattgtggcagcgaaaggacaccctgctggccgctaagaccggcaacttcgcccccggtctctttctgacgccgcgtaatagtgtatgttctcaactatcgacattgaacaacccggtaatgagatgagacgtattgaggtagtactgcgggagctggagaggctgagccaggccgtgacgctggaggatttagccaggggctcgaacgccttcaccgcagagcaaatcggctttaacctcgggctggcgcgcaactcggtgagtaaagatctcaaccagctgtggagcgacgggctggtgattaaaacgcgcggccgcccggtattctttttacatcgccggacgacggaaacgctgctcgaccgtacgctgacggaaagcgaacgcgagccggcaacgctcgccgatctcctgccgcagccacaagataacaatgaggctgtcgacccgttcgccatgctgatcggccacgatcgcagcctgcacgatgccgtggaaaaagggaaagccgcggtgctgtatccccacgggttgcacgtcctgctgaccggtccctccggcgtgggtaaaaccttttttgccgagctgatgcaccgctacgcctgcgagcatgccggtgaaaaacggccgccgctggtctacttcaactgcgcggaatacgccaacaacccggagctgctgtcatcgcatctctttggccaccgtcagggcgcctttaccggggcgacggaaaacaaaagcggactaatcgaacaggccgacggcggctatctgctgctggatgaagtgcatcgcctgccctatgaagggcaggaaaagctcttctcgctgctggataaaggcgaatatcgcccgctcggcgccagcggcccggcgcgcaatatcgccgtacgtctgatttgcgccaccaccgagcccatcagttcatcgctcttacgtaccttccagcggcgtattcaggtcaccatcgatctacccagtatccgccagcgttcggttgaggagcagattgaactgatcatcggctttttacaacgtgaaagccgcaagatcgaacgcacggtaagcgtagataaacccttgctgctgtggctgctgaacaagccgctggagggcaatatcggccagctcaaaagcgatatccagtttttgtgcgcccaggcatgggcctcggggatggcggcccataacgaagtattgctactggatagcaaactggcggacggcccgatcaatgccacgccggagcagcgacagctggtcgatgcgctgtttaacggccgtcccctgctaaacatcgatgcccgtactcttccgcagttgaaaagttcagctgccgatgacagcgtcgaggagagcgacctgttctacagcttcctgacccgcgagtacgttaacctgcgcaacagcaacgtgccgcccgccgagacgctggcgatccttaaaaataagctcagttcgatttttgaatatggcctctatagccgcgataacgccagccatgccccgcgctatggcgatcggattgaagagcgggtggatctgctgatcggttacgttgagcaggtactcggcttcgccctgccggaaaacctggtcaacccgctgcgtaaacactttctcgctctcatcagctacgtacaacgcggcctgatcccgcagttatactcttcgagcctgatcctcgatcgctgcaaagatgaatacgataatgccactctcttgtgcaagaagatcaacgatctgctgcatatccagtgcccggccaccgaggtggtctggctgtgcctgttcctcaaagagtgccgccattaccgccagcgcatcagcgccagcccggactgcggggcgatcctcatagcccatggcgccaccaccgccaccagcatggcgcagtacgtcaatcgggtgctggagcgcgaattgttcaacgctatcgacatgccgttcgagcaatcggtgcacgatacgctggaaaaactgatccaactgatccacagcaaaggctggcagcggctgatcctgatggttgacatcggatcgctggtccatttcggtagcaccatcagcaaactgttccagatcgatgtcctgctgatgccgaatatcaccctgaccagcctgctggagatcggtctcgatctcagctacgaaaccggcgacctgccgcggttggtcaatctgatgcaggaaaaaggtatcgccagccagctatgcacgccgcagcaggagaacgccggcaaggtgctggttatctcctgcattaccggcatgggcacggcggaaaaaatcaaaaaggtgctggaggagagctttggcgagctgatgtcgcaggatacccggatggttatcctcgattacaacgaagttcgcagcccggagcgcctgcagcaggcgatcagggcgcatgaacggctggcgggtattgtcgggacattccagccggggctgcccgatatcccgtttatctcgctggaggagctgttttccgagcaggggccggagctggtgctcagcctgctgacccccgatttgtccagcagtgaacgtcgtctggagatggagcgcagcgcttcacggtttatcagcgccctgaccatggaaagcattatcaaccatatttcggtgctcaatccgcagcgcatattaaaagaaatggaagggatcctgaatcagctcaggaacacgctggccatcgcgcctaaccgccaggtgacactacgctttctgatccactgctgctgtatggtcgagcgtatcgtgattaaccgtaaaccgttacagatggcgctggaaacgcggccggatatggacgctcaggcatttagtgtcatcaaatcggctttccatccggttgaagaggcctacgccatccgtttatccgatgccgagtacatttatatctacgaattattatttagttaacgcctgttctggcgcggctttgcggcccgccagccctttcctctttggtagatgacacaaattgtggcacgcgctttgctcttattagtgcgtcaacgattcggcgccaggaggccactttgtcatccactgaacctaccacccagttaccccagattctgctgctgacgcacggcggctggggcacgcaactttgcgacagtctgcgcatggtgaccggcgaaatcgccggcgtcagcgaaatcgcgcttatgcccgtcgataccctcggcgagttttatcagcgcgtcgaagcggccgtgcaggcgatgcctgcaggatcgctgattttgaccgattttctcggcggcaccacctccaacgtcgccgcgcgcttgagcgcggattatcccatcgccgtcgtctgcgggcttaacgcctcgctgctgctggaggcgttggatctgcgcgaacagggtccgctcaccggctgcgttaatgcgctggtcgaagccggacgcagcagctgccgcgacgttgtcgcccacgtgaaccagttaacctcgtaaggagcccatcatggcaaaaatcgttttatgtcgtatcgatagccgtctgatccacggtcaggtcgtcaccaaatgggtcggccagtcgcaggccaatcgtatcgccgtggtcagcgacgagctggatgccgatccgtttatgaaaaatatctatttaatggccgcgccgccgaacatcaaagtcgactgttacggcaacgccagcttcgccgccgcctggaaagagaatcagctcggcgatggcaatgtgctggtgctgttcccgtcactgtcggccgttcaggaagccgttcagttgggctttgacgtgcagacgattcaggttggcgggctgggcggcgggccgaaccgcaaggccgtgttccagaacatcacccttgatgaaaaagacgtcggcatcctcggcgctctgaaagatagcggcattcaggtgttctttcagaccatcccggaagataaaccacagtcactggacgacatcctgaaaaaattctaaccagttgataaaaaggtaaaaactatggataccttactctttgcgagcctgatggggttgtattactggttcgcccgattacgtttaggctataccttctccgccatgttgctgcagcccgtggtgatcgccgtattcgtcggcctgctgctgggcgatatgaaaaccgcgatgatcatcggcgcgggtatgcagctggtctatcttggagtgacctccacgccgggcggcaacgtgccgtcggacccggcgctggccgcctgtatcgccattccgatcgccgtgaaggccgggatggagcccaacctggcgatcgcgctggcaatcccgtttggcgtcatcggggtattcctcgatcagctgcgccgcacgctcaacgccgcgtgggtgcatatggccgacaaacacgccgaaagcgccaacatggcgggcatcatgcgctgcgcctttatctatccggcgctgctggggctggtgctgcgcttcccggtggtcttcgccgccaactactttggccaaagcgtagtggaaaaattcctcaaactgatgccgcactggctgacccactcgtttgaaattatgggcggtatcctgccggcgctgggctttgccatcaccatcatggtgatcggcaaaaagagcctgctgccgtggtttatcggcggatttttcgcggtgctctacctgaaggtggacatcatggcgatggcgattttcggcacctgcgtcgccttcctgattaaaggcctggccaaaaatgaaggagctgcatgatgagtagcgatgtaatggaacatgaactggttgaacgcgcccgcgaaacccaggcgctgagcaaagccgatatcaccaaggcctggctgatttactggctgggggcggaggtatccagctcctacgaacgtctgcagagcctgattttctgcgcctcaatgacgcccatcatcaaaaagctgtacccgggaaaagaggagcaggccgaggcgctcaaacgccacctgaacttctttaactcggagcaaactttcggctcggttatccagggtatctccatcgccatggaagagcagaaaacccgcggcgagccgatcagcgatgcttcaatcaccgggatcaaaaccggcctgatggggccgctggccgggatgggcgactcgattatctgggccgcggtgatgccattgctgattgccattttcatccccttcgccgccagcggcagcgcgttcggcgggatcgccccgctgatcctctacccggcgatcaccatggcgataagctacggactggtgcataaaggctacaccctgggccgtgactccattatcggcctgctgcaaggggggcgaattaaagaattgatttacggtgccaacgtgctgggtctcatcatgatgggcgcgctgtcggcaagctacgtcaaaatcaccaccccgctgaaaatcagcgcgcttaaaggctcggaagtggtggtccagcagatcctcgactcgattgcccccggcctgctgccgctggcggcagtgttcgctatctatttctacttactgaaaaaagggccgcgctacaccaccattttactgtcaatcgttgctatcagcatcgtctgctcgctgttgggagtgctgtaaatcatgaacggcaatatctaccagcaactgggcttaaaacgggtgattaacgcctgcggcaaaatgaccatcctcggcgtgtccgccgtcgacccgcaagtgatgcaggccaccgcgcaggcggcgggggccttcgtcgaaatcgataaattaaccgaccgtgcgggcgagctggtttccgcccacaccggtgcggaagacagctatatcacctcctgcgcctccgccgggatcgctatcgccgtcgcggcggctatcacccgcggtgagccggaaaaggtggtgcagatgccggacagcagccagtggccgaacgagatagtgatactgcgcgggcataatgtcgattacggcgcgccaatcaccagcgccatccgcctcggcggcgggcgcattgtcgaagtcggctccagcaatctggcggcgcgctggcagttggagagcgcggtgaacgcacgcacggcggcgcttctgtatgtgaaatcgcaccactgcgtgcagaaaggcatgctcggtattgacgatttcgtgcaggttgctcgccagcataatctgccgctgatcgtcgatgccgccgccgaagaagacttgcgccagtgggtcgccagcggcgcggacatggttatctacagcggagcgaaagcctttaacgccccaacctcaggctttattagcggcaagcgcaactggatcgccgcctgtaaagcccagcaccacggtatcgcgcgggcgatgaaaatcggcaaagagaatatggtcggtctcgtctacgcgctggaccgttaccggacggcggcgccggcgcctgacgccgccgcgctgcgtccattcgccgaggcgatttccgcgctacccggcctgtgcgccgatatcgagcaggatgaagccggtcgcgccatctggcgcattcgggtcagcgtcgacgccaatgaactgggactcagcgcccgtgaggttgaagctcagctacgcggcggcgatatcgctatttacgcccgccgctactatctgcatgagggccattttagccttgacccccgcaccgtcggcgaaggagaaatgtcgctcatcgtcgcgcgcttacaggagattacgcaacatgcagcggattaacttttatcgccagcgggtggcgataaatgtactggcgaaggacatcgccaacgcccgggaaatccatgaagccgccgaagggcacgcggtgattggcgtactctcggcgcaatttaccagcgtcgaacaaggcgttgcagaagtgcgccgctggatggcggaagtgccttctatttccgtcggtctcggcgccggcgatccggcgcagttttacaaagcggcaatgatcgccgcgcaggtccaccccgctcacgttaaccagaccttcaccggcagcggctttgccgccggggcgctggcggcgaccggaggccagcaaacctttattaatgcgctggtcagccccagcgacacgcccggtgaagtacgcatctccaccggcgtgcgcagcgcccaaggcattccggcccaggtatcctgcgatgcggcggtgagaatgatgcaggatatgggcgcgcacgcggctaaatttttcccgatgggcggcgaaaagtcgctggcggagctgaaagcgctcgcccaaagcgcggcagaaaacggtatgacgctgattgagcccaccgggggcatcgatctcgataactttgcgctgattctgcaaacctgcctgcaggccggcgtcgcgcagatcatgccgcacgtgtacagctccattatcgatccgcaaagcggcaatacccgcccgcaagatgtccatgctctgatgaacatcgtcaaggaactggtcgattaatccccccgcgcgtgcggtgtaggccactattaccgcacgcgctaactgcctgatctgcggaaggtcactgtcaatctgtgagcctccacgcaataaccgcatcccgccgtgcaaagcgccctctcatattgatagcgatcaagaataatcataccgtctggtcggtatgatccgggccatgaacatggaagcccagcatcgtaaaaaagaccccgtccgtttgcatcgtcaactgcttgaatcggcggcgatgattgccggccgggacggtatcgccgccctgtcgctgaacgccgtcgcccgcgaagctggcgtcagcaaaggcgggctcatgcaccattttcccaataaacaggcgctaattttcgccctgttcgcccggctgttggcgattatggaaaaggcgattagcgagctgatggccgccgataacatcgcttacgggcgctttacccgcgcctatttgcgctatctgtccaacccggagctgacggatacccacgaaagccggcaactgatggtgctgtcgctggcgatgcccgacgaaccggtgctgcgaaaatgctggcgcgactggatgctggatcatctggcgcagggcgatgcgctcgataacggcccaaccggcacgctggtgcgctacgccgccgacggcatctggttatcggaactgaccgaagggcgcaccatgagcagcgaacaccgccaggcgctggtaaacgatctgacaaaaatgacgcttcccgcgtgaagcgagtagagtgaggccgcgatgcgctacaacatcaatgcccgtctcatttatgacgcaacggacggcaccctaacattaccgggcggcaatgagccggatagccagctatccattaccgccaacgcgctgctctatttttttcttcgccataccggcgtcgtcagtcgcgatgaagtgttgaaaaaggtctgggacgataacggcttaacctcatccaacagcaatctcaatcaatacctgagcatgctgcgcaaaaccttccgccactacgatatcgataacattattgtcaccgtgtcgcgcggcatgctgcagctgaatcaggatctcagcatcgaactgctcgacgccgagccgacgcccgccgatgccgttctcacatgcgctacgcctgatgaagccgcccccgctgcggcgccaacgccgcccaccgcatctctacatgcgcgcggtatgtgctggtatctggccggcggctgtctgttgctcatcgccctgctgctggtggcatttagtctcgccggcacccacgtcgcccggccaatcaatctgacgctgatgagccacagccagtgcgaactgctggccagcgatgaaatgctgcgttcggtttccgccacggcctacggtaagaattttgatgaggtgcgtcagcggctgaagctcagctgcaagccgggggagcgtttcgttttcttctacggcgaccggctggagactaacggcctgggccgggtatttctcgcccactgcgcgatgcacgaagacaacccatttagctattgcgataactacttttactactcctggaagccgcaatgagactcgcgccccgcccctttttcgccctctccgccctcgcgtttatcgccgccgccgggtttagcgcctggcgcctgctgccggatgccaacgacggcgtgatgagctgctccaccaaagcgatcatgcgttttgaaaacatggaaaaagagaatgtgaatggcaatatccattttaattttgccgccaacggtaacggttcgatggtggtggaaggctataccgattccgccgccggctggctctatctgcagcgctacgtcaaattcagctacaccagccaacgtatctcagcaaccgaacgccactaccgcattaaaaaatgggaatccagcgcctcatccatcgacgaatcgcccaatgtcatcttcgactacttcatgcgcgagatgtccgacagccacgatggcctgttcctcaacgcgcagaagcttaacgacaaagctatcctgctgagttctatcaactcgccgctctacatctgcacgctgaagtccggcagcacgcttaactaacccatcccccccctgtaccgccgcgaggaaaatgcgccctcgctcacgcgccattattgccccctctttccacgatgctaaaagcgcacgttttgcatttagcttcgacgccaaaacatgagcatacccacaattatcccatggctatattactaaccgctggcaagtaattagcatcttattaacattcatctcccgccgataaatagcctaaaaaagcgccatatcatcataaaaatcaatacgcataaaacagaacgaacagataaacagaaggctaaataaggctaaatcacagagtaaaaacctaaaatattcatcctcacggatttaaatttcacttctttccccattccctatagtgaaccccgaacgccgcttccgcgtgttgatgccgttacgcggacggttttcccgaataacaaaacctgttctggaggaaatcacgatgggtgatgcattggggcttatcgaaaccaaaggtctggtggcctgtattgaagcagcggacgcgatgtgtaaagccgccaacgtcgaactgatcggctatgaaaacgtcggctctggccttgtcaccgtgatggtgaaaggcgacgtcggcgcggtaaaagcggcggtggattccggtgtggaatccgcgcagcgcatcggcgaagtggtgacctcgctggtcatcgcgcgtccacataacgacatcaacaaaatcgtcattaaacacaaggcctgaaggccaggagaacacaaatgggtgatgcattaggtctgattgaaaccaaaggtctggtggcctgcattgaagcggcggatgcgatgtgtaaagccgccaacgtcgagcttatcggctatgaaaacgtcggctccggtctggtcaccgcgatggtgaaaggcgacgtcggcgcggtgaaagcagcggtggattccggtgtggaatcggcgcagcgcatcggcgaagtggtgacctcgttggttatcgcccgtccgcataacgacatcaacaaaatcgtctcgcattacaaaattgcggactaacggagaaacctgatgaaagaagcgcttggtcttatcgaaaccaaaggtctggtggcctgcattgaagccgcggacgcgatgtgtaaagccgccaacgtcgagcttatcggctatgaaaacgtcggttccggcctcgtcaccgcaatggtgaaaggcgacgtcggcgcggtcaacgcggcggtcgactccggcgtggaagcggcgaaacgcatcggcgaagtcgtcagctctcgcgtcattgcgcgtccacataacgacatcgaaaaaatcgcggcgcagcacaaagcatgacctgacagggcgcgccccgtctccactcttttcgtctgatgaaggatagactcatgattgaactggataacgatttgcaatcccggcagaacacgcgggaactggtgcgcaacgccaaaaaggcgcaggcgattctggccaccttttcgcaacagcaaatcgacgccatcgtgaaaaacgtggcccaggaagcagcgcaccacgccgaagcgctggcgaaaatggccgcggaagagaccggttttggcaactggcaggacaaagtgctgaaaaaccgtttcgcctcgctgcgcgtctacgacgccatcaaagatatgaagaccgttggcatcattcatgacgacccggtaaaaaaagtgatggacgtgggcgtgccgctcggcgtgatttgcgcgctggtcccctcaactaacccaacctctacggttatctacaaagcgctgatcgccctcaaggccggtaacgccattatcttctccccgcatccgggcgcgcgtcagtgcagctggaaggcgattgaaatcgtcaaacgcgcggcagaagcggccggcgcgccggcaggcagcgtcgacggcatcacccagttaacgctcgaagccacctccgaactgatgcacagcaaagacgtgtcgctgatcctcgccaccggcggcgaaggcatggtgcgcgcggcctacgcctccggcaccccgaccatcagcggcggcccgggtaacggcccggcgtttatcgaacgcagcgccgatatccaccacgcggtgaaagatatcgtcaccagtaaaaccttcgataatggcgtgatctgcgcctccgaacagtcgattatcgtcgaacgctgcatttacgacgaggtccaccgcgagctggaagcgcagggcgtctacttcatgaatgaagatgaggcggcgaaaatggcggcgctactgctgcgcccgaacggcaccatcaacccgaaagtggtcggcaaaaccgcgctgtacctcagccagatggcgggattctgcgtcccggccagcactaaagtactgatcgccgagcagaccaccgtatcgccgaaaaacccctactcgcgcgaaaaactgtgcccggtactcggcctgtacgtggaagaggactggaaagccgcctgccaccgcgtggtggagctgctgaccaacgaaggacttggccatacgctggtgatccacacccgtaatcaggacgtcatccgccagttcagcctcgaaaaaccggtcaaccgcattctgattaatactccggcggcgctcggcggtatcggcgcgaccaccaacatctctccggcgctgactctcggctgcggcgcggtcggcggcggctccagctccgacaacgtcggcccgatgaacctgctcaatatccgcaaagtcggctatggcgtgcgttcgattgacgagcttcgcgcgccgggcagccgccctgagccccagccaaccatcgttactccggcgagcgatccgcagcgcagcattcttgatgacgcgcgtttcaacgctccggcgaacgccgcgccagcgcgctccgcaggcaacgatgaccgtttcgccagcgcaggcgccgccagtatggaaggtgaaatcaacgaacaaaatgtggaacgcgttattcgccaggtgctggagcgcctcgctaagtaacgcactgatataaggcgataaacgatgattctcgcaaaggtaaccggccatgtcgtcgccacgcagaaatgcgatgagctacgcggcagcaacctgctgttgatcacccgcttagatgacaaacagcagccgatgaaagaccagacctgggttgccgtcgataacgtcggcgccggcatgcacgacatcgtgctggcggaagagtacttcgcgctcaataaagaccgctacaaagcgatgtcggtggtcgccattgtcgagaacgtgtttcgggacgcctaacaggagtgaatagcccaatgagtgaatttttactgaaaccgcggatttgcttcggtcaggacgccctctcggtgctgaacgaactttccgcccgcagcgtgctgctggtgaccgataaagcgatggtcaagtttggtctcgccgagcgcgtcaccgccctgttgcgccagcgcgggatcgcctggcagatgtgggacgacgtggtggcggatccggatatcgccaccgtagtgcgcggcatgaagttaatggataaccactacccggatctggttatcgcgctcggcggcggttcggtaatcgatgccgccaaagcggttattttctccctggcgcaaacccgtccgcagactgaccgcccgcgtccatgctttgtcgctatcccaaccaccagcggtaccggctcggaagtcaccgccttttcggtggtgaaagccaacgcggaaaagctggtactggtggatgcgtcgctgctgccggatatcgccattcttgacccggcgctggtggcttcggtgccgccggcgattaccgccgacaccggcatggacgtgctgtgtcatgcccttgaggcctacgtctcccgcgccgccagcgacttttccgacgcgctggcggagaaagtggtgcagcaggtatttcgctatctgccgacctgctggcgcagcggcgacaacctgcaggcgcgcgaaaagatgcataacgcctcctgcatggcggggatggccttcaccaacgcctcgcttgggataacccacagcctggcccacgccctcggcggcgtcttccgcgtgccacatggccgcgccaacgccctgttgatggcgcaagtcgtcgcctggaacgccgatttcgacggtcagtgcgacacccttgcggcaacgaaatatgcccgtctggcgcatctactggatctgccagccgcctcgccgcgccagggcgtcgccagcctgctggtcgccattcaggctttaaaagaagagatgagcatgccctccggcattagcgacaccggcattgaggcggctgaattcgaacgccgtttgccggagatggtcggccaggcgctgcgcgacagctgtacccctaccaacccacgcgcgccggacactaacacgttaaccgagctttatcgccgggcctggtccggtcatcccgtacagggccactgataacaagatttggagaaccttacccatggcacactacagcttaacgccgcgcgtcaaagtgctggcagaccgtttacgctcgcaggcaagcaccctgtgcaccgagcacgccgcgatcctcagcgcgctggatagcgatatcgcgggcattcccgccgccgtcaaaccggctcgccgtttctatgaactgatgcgccagctgccgctgaccatcagcgccgacgaactgatcgtcggtaaccagacccgtaaaccgcacggggcgattttccatgatgaaagcgccgcgcatcgcccatccgtattccagttcctcaacctcaacagcgatctcgattcaccggattacaaactggtcgtcgaaaaaggcgtgctggcgattaaacaccagttagaagagaaaacccgcgccctcggcagcgccgttagccgcagcggtatggatgaagtcaacggctgccgcgccgccatctacgcctgcgacgccctgctcgcgctggcgcaaaatctggccaacagcgccgaacagctggcggccgcggaaaccaatgcttatcgcaaagccgagctgctcgatagcgcggccattctgcaccacgttccggcccatccggcgcgtaatttcaaagaagcctgccaggcattctatctgttccagctggcgctacagctggacaacggcagctatgcggttaacccgcaaggggcggatatcgcgctactgccttacttccagcgcgatatcaacagcggcgcgctgaatacccagcaggcctatgaaatcgtggagtgcctgtggttcaagctggcggaactgagcgaagtccgcgccgcctgcgccattgacggctatccgatgctcgacgccatgctgcgcggcgccgcttttgacaacgccgaagtgaacgaactctcggcgatgtttatcagcgcccagcgcaaccttaacgcgctgaatctgccggtgcgtctgtttagcggcgtacagcaggtcaaccacgcgccgttcgccgcctgcgccgacacgccggtgatggaaggcttaaccccgcgtatgcagcgcctgcgtaaccactacctgacggtgcgcccgagcgtctctatctatcgcgcgctggcctttaccgaagtggtcaaagccaaccctggcatgccgaccattttgctgcgcgccaaagctttccgccacgcctgcgaaaccgcgccgattctgattcaggacgatgagctgatcgtcggccatccgtgcggcaagccgcgcgcgggcgccttctcgccggatatcgcctggcgctgggtacgcgatgagctcgacaccatgagcacccgcccgcaggatccgtttgaaatcagcgaagcggataaaaaaaccattcgcgaagagatcgtcccgttctgggaagggcgttcgctggacgagatttgcgaagcgcaataccgtgaggccggcgtctgggccttcagcggcgagaccttcgtcagcgatctctcctatcaccagattaacggcggcggcgatacctgtccgggctacgacgtgctgctattcaccaaagggatgaacggcattaaagccgatgccgaagcgcatctggccagcctgagcatggaaaacccggaagatatcgaccgtatctactactacaaagcggcgattgaaacctgtgaaggggtggtcaactacgcccgccgcatcgccgcccacgcccgcgaactggcggctaaagagcaaaacgcccagcgccgcgccgagttgctgaccatcgccgacgtcaacgaaaacgtgccggccaatccgccgaagaccttgcaggaagcgctgcagagtatctggaccgtcgaatcactgtttgaaatcgaagaaaaccagaccgggctgtcgctggggcgcgtcgaccagtactgctacccgatgttcgaagccgatatccgcgaaggccgtctgacccacgacaccgcgctggagctgctgcaggcgttcatcatcaaatgcgccgaactgatgtggatgtcgagcgagctgggagcgaaatatttcgcgggttatcagccgtttatcaacctcaccgttggcggccagaaacgtagcggcggcgatgcctgtaacgacctgacctatctgattatggacgccgtgcgcttcgtgaaggtttaccagccgtcgctggcctgccgtatccacaaccagtcgccgcagaaatacatggaaaaaatcgtcgacgtggtgaaggcgggaatgggcttcccggcctgccacttcgatgactcccacatcaagatgatgctgcgcaaaggcttcgattttgaagacgcccgcgattactgcctgatgggctgcgttgagccgcagaaatccgggcgcatctaccagtggacctccaccggctacacccagtggcctatcgctatcgagttcgtgctcaaccgcgggcggatggtgctgttcgatagctatcaggggctggataccggcgacctgcgcgacctgcgcaccttcgacgatttcgacgcggcggtgaaacagcagattgcccatatcgtgcgcctgtcggccatcggcaccgtcatcagccagcgcgtccaccgcgatgtggcgccgaagccgctgatgtcgctgctggtcgagggctgcatggagagcggcaaagatgtcgccgccggcggcgcgatggtcaaccacggtccggggctgattttctccggcctggcgacctacgtcgattcgatggcggcgatccgcaagctggtgtttgaagagaagaaatacacccttgagcagatccgcgatgcgctgctggccaactttgaaggttacgaagcgctgcgccgcgactgcctgaacgcgccgaaatacggtaacgacgataactacgtcgaccagtacgcgctggatattaccgaatggaccgagaaagagtgccgtaagtacaagatgctctactcgaccctcagccacggcaccctgtctatctccaacaacacgccaatcggcgagttgaccaacgccacgccgaacggccgcctggcgtggatgccgctctccgacggcatcagcccaacccagggcgcggataaacaaggcccgacggcgattatcaagtcggtcagcaagatgaacgtggaaaccatgaacatcggcatggtgcacaacttcaagttcctcaaagggctgctggataccccggaaggacgccacggcttgattaccctgctgcgtaccgcctcgattctcggcaacggccagatgcagttcagctacgtcgataacgaagtgctgaagaaggcgcagcaagagccggagaaataccgcgacctgatcgttcgcgtcgctggctacagcgcctacttcgttgagctgtgcaaagaggtccaggacgagatcatcagccgtacggtgattgagaagttctagttctcttaaagagaattaaatgagctgtatttgagaaataaccggaagttctccgtcccgtaacgggacggagcgggaggcaagcgtgatcgcaaaacaagaattaacgggccgaattttcaatatccagaaatattcgatctatgacggcgatggcattcgcacgctggtgttttttaagggctgcaacattcgctgcccgtggtgcgccaacccggaagggctgaacagccagttccaggtgatgttctcgcacgacaaatgcattaactgcggcgactgcgtcagcgtctgtccggcgggtattcattatcgggcggaagagaacggcgaaatgaagcacttcgtcaaccgcaataaagactgcattggctgtcgcaaatgcgaagagatttgcacccagaacgcgctgtacattatgggcaaggacgtcaccgtcagcgagctgatggagatcatcatgcaggactacgacttctacatctcctccggcggcggcgtgaccatcggcggcggcgagatgagcctgcagaccgattttgccgtcgccttattcagcgaatgcaaaaaaatgatgattaacaccgccgtcgaaacccagggcaccaccccgcttgccaactaccagaagctggcgccggtcaccgacaccttcttgttcgaccttaagcagattaacagcgaacaccacaaagcgatgctcggtatcggcaacgaagggatccgccgcaatctcgaatggctggtggattccggcgccaacgtcattgtgcgtatgccgctcattcgcggctacaacgactcattcgacgccattaccggcgccattgattacgtacagaagctggcgaagcgtggaaatatccgccgcatcgacatgctgccgtaccaccagttgggacgcaaaaagtacgaacgcctggatatgccctacccgattacccaggacccgtcttattcaccggacgaactggaccggctggaaaccttcttccagcaatttgattttgatattcgcttagtccgccattaacaggagccgaccatgaaaagtttaggcgtaattgaaacgcgaggatgggtcgccgccattcaggccgtcgacgccgcctgtaaagctgcgggagtgacctgcattggctatcgcaaaccaggctccgggctggtgagcgtctgctttgaaggggagatcagcgccatccacaccgccattgaacgcggcgtggcggtcgcaggcgccgagcacaccgtgaagtcgctggtgattgcccgcccggagcgctgcgtggttgaagcgttaagcaacctcaaaggcaacccgccgcgcgagcaaaaaacggccgaaccggtggttatccccgccccggaacctatcgtcccccctgccgccccgaacgaaacggaagataaacatccggcgctgaagaaagggaagaagtcatgatcgacaccctggttcgcgaaaaaatcgccgcccgcctgagcgcaacggcgccggcgatcccggtggggatctccaaccgccacgtccatctcgcgcaacaggacgtcgaggcgttgttcggcaaaggctacagcctgacgccgtttaaaccgctgcgccagccggggcagtttgccgcccaggagtgcgtgaccgttgtcgggccgaagggctcgctgaccaacgtccgtgtcctcgggccgacccgcccggtttcgcaactggaagtgtcgcgcgccgactgcttcacgctcgggattaaggcgccagttcgtgagtccggccagctggagaatgccggtagcgcgctgctgattgggcccgctggtcacgttgaactccattcgcaggtgatctgcgcctggcggcatattcacatgtcgccgcaggacgcgcgccgactcaacgttagcaatggccagaaggtcagcgtgcgcagcaacggcgagcgccagctgactttcgatgaagtggtggtgcgggtgcgcgatgacttcgcgctggagtttcacattgacaccgaagaagccaatgccgccgggttgaaaaacggcgcgcaggtgacgctcatcggctaacggaggctcgccatgaccgacgaacagattgaaggtttagttgcgcgtgttttgcagcgcctgcgcccgccggtactggtgatggtgaccgccgctgacggctatcgcgcggctatccgccagcgcctggcaagctgcggctacccgctgcgcctcgcgctggaggatggcctcgctgacgccgccgcgtggcgggaggtcggcgagataattccctcttcgggctggcaggatgccctgccgtcggcgccgtggcgggcggtactgctgccgtttctcgattatccgctggcttcagacctgctgaacggcacgctcagcagcccgctcgcccgctgcgcgcacgaggcgctgctggcgggtattccagtgctggcgctgcgctaccactgcgatccgctcagcgaactcaaccaactgcgcggcgcgcaggccgacagcgcctataccgggcatctgcaggccacgctggctcgtctggaatcctgcggcgtcttcctcggcaccatgaatgagctgctggcgacgctggacgcgcccaccgcgcctgccgccgccagcggcgaaccgcgccgttatctcaccgtcacagacgtggtgaataatccagcgctggcggcggccccgcacgcgcagctgaccgatgcggccattgattatttaaaaaacagaaagatatgaccttacccaactatgaacctggagcttaacgatgtcttcgaaaacaaaatgctggttatggatgctgctggttatcctctccgaaacctcggcaacctcgacgttaaaaatgttcggtaacagcgaaggcagcacaaaaatgctgctgctcgtattgctgattgcgctctattgcacctgctattactcgctctcaagggcggtgaaagatatcccggtcggcctggcatacgccacctggtccggcaccggtatcctggtggtctcgacgctgggaatggcattctacggccagcatccggataccgccgccatcatcggcatggcggtgatcgccagcggcatcgttatcatgaacctgttctcgaagatgggttccgaagagagcgaagagcccgcgcccgccgcgccagtcgcctccatggataagaaaatcgccaactaacaggaaaggaacaccctatgtttaatctcggatttttatggctggcgctgtctatcggctccgaaatcaccggcacctcgatgatcaaaaaaaccaacggcttcagcaagctggcgccttcggtgctggtggtctgcgcctatggcctgtgctacttcgccctcacccgcgcgatgagcaccattccggtgggcgtagcctactcgctgtggtgcggcttcggtatcgtcggcgtcaccatctgctccatgatcctctataagcagaaaccggacctggcggccattatcgccatggcgctgattatctccggcggcgtgatcatgaacgtcttctcgaccatgtaatcgaagcaggtttaccccgccgtgatttcgtggcaggataaaaagatgaacagaaacgttatcgttacctacccccgtcgttggtggctgcctgcataacaggcggcacgatacacgtttccattttcaaagccgccggaaggcggctttgttatttccaggacgtctttcggctgaacagtctgataaggagtccctgatgaaccatccacaaaccatcctcaccggcgaccgcccgaccggccaactacatcttggccactacgtcggttcgctgcgccagcgcgtcgcgctgcagcacgaccaccagcagtttatcctgatcgccgacctgcaagggctcaccgataacggcagcaacccgcaaaaaatcagccaccatatcctcgaagtcatggccgattatctggccgtcggcatcgaccccaggctcaccactatttgcctgcagtccgctctgcccgcgctggcggagctcagcgcgctgtatatgaatatcgtcaccgtcgctcgcgtggaacgtaatccgacggtaaaaaatgagatagcccagaagggattcgcccgctcgctgccggttggcttcctcgcctatccgattagccaggccgccgatatcaccgccttcaaagccgagctggtgccggtgggcgacgatcagctaccgatgattgagcagaccaatgaaatcgttcacaaaatgaatagcctcaccggcgaaccggtactgcgccactgcaaagcgttactcagcgaagtgagccgcctgccgggcatcgacggtaatgccaaaatgtcgaaatcgcagggcaatacgctgacgttatcggccagtgaagaggagattcaccgcgcggtcagcgcgatgtataccgacccgacacacctgagagtcagcgatcctgggcatgtcgacggcaacgtggtgttcacctatctcgacgctttccatagcgataaggcgcgggttggcgagatgaaagcccactatcagcgcggcgggctgggcgatcgccagtgtaagaatgaactggaaacctgcttgcaggagctactggcgccgatccgcgaacgccgggctacctacagtcaggataaaggaatgatgctggaattgttgcgccagggtagcgaacgcgcccaccagctcacgcagcagacgctgcatgaagtgaagcgcgggctggggctgccggtactgttctgagcttcggagccctgccccggtcgcgctacgcttgccggggctcggttttataccctgcctttgtgcattttcacgcagttgcgcccctcgcgtttggcggcgtacagcgcattatcggcatcgcgcaacagcaggttgtaatcgggatggccggagtgcacggcatagccaatgctggcggtgattgggatctgcgtgtcgccgccaacgttaaacgccaattggctaattttcttgcgcaggcggtcgaggatggtaaacgcctccgacacgccggtctccaccagcaccagcagaaactcttccccgccgtagcggaagatatagtcgctggaacggatattatcgctgagcagttccgcgacatgtttaatcgcccggtcgccgaccatatggccccagttatcgttaatgcctttgaaatgatcgatatctacgatcgctaccgtcattggcagctcatgctccattgccagcgtcacttcatgcttcagcactaccggcaaatagcggcggttaagtaggctggttaacgcatctttgccattttgcatctgcgacaagctgctaaaaatcacccccagttggctgcctatttgctggcaatgaatatggatcccctgaatcaggttttgtgtatttttataatccatgacagaggcggatgctcgccaacctattaataagtcgtcaacctgcgaaattaatgcggcaatttcgtccatctggctatttttgttaaaatagcgtacgcatttatggcggaaccatagaccaaattctgattcagataataacgtagcgttagtatttgctttattttcgctaacaatattaaaaattgccgtattttcccaaccggaaagcgccgcctgctgtttgccatattccatcgggacattgtccatcaaactatacaggcgatacgcctcttcgtttttggtcgcccgatagtgcgataaggtataggcatggcacatcatctcaacggccatattaatcgccataatagcgtaatagatggcatcgacggcaatccggcggtcgttaacgtggctgcggatatactcgataagcccggccttaatttgccgggcgccgcgcagcaccgcctccgccgggatgccgatccgtgcgtggatgctgccaatctgatattgccgttccgccagcgccggcaactgcgctttgccgctggtcaggatctccttcacccatagcgccagcgagcggctcagacgctcctgaactaaatcataagtcaggtggcgggcaatatccggatcctgaaaaataaaatcataaaaccgggccgctaacgcttccgattgttcctctgcgatatttttaagtacctccttaacggctggcgtcaggctgtcatacagcggtagccactccttaaaaataacagagatatattttttgctttcatcgttcatgaataaagcgctcgccgggcgttagtctatttcggggttgccgatcatacatgagttgccgcaggtcaaccagacgaagaaaatcatagggatagcgtagttctcagccattacaatgaggggttcgcaattccatagtttatatatggactttgccgctaccgatgttagtatccagattataaatatgcgtgtttcatttaaggccaggattgctgatgatgaccactctaaaagcacatcttccccaccggttggcaacgtaacaggattttgcgccggacggccttatctccccttttttatcgtcccgccgggcgaaatagcgaaacgcgcaccactcagcaatatggaacagagcgagtcgcgtatggataagaacaaacgacgttggaccgggtatatcgtagttgcagcggtggttatcgccgcagcatggtggatgttgcgcccggccgggctcccgccgggcttcgccgccagtaatggccgcatcgaggcgacggaagtcgatatcgccaccaaaattgccgggcgtatcgagacgattctggtcaaagaggggcagttcgtccataaaggcgatgtgctggcgcggatggatacgcgggtactcaatgagcagcgcctcgaagccgccgcgcaaatcaaagaagcgcaaagcgcggttgccgccgccaatgcgttactcgaccagcggcagagcgaaatgcgcgccaccgaagcggtggtgaagcagcgccaggcggagctcgattccaccgctaaacgccacgtccgttccagtaccctttcgcaacgtggcgccgtctccgctcagcagctggatgacgatcgcgcggccgctgaaagcgcccgcgcggcgctggaatcggcgaaagcgcaggtctctgccgcccgcgccgccattgaagccgctcgtaccagcattattcaggctaaaacccgcgttgaagccgccgaagcgacccatcggcggatcctcgccgatattgacgatagccaactgaaagcgccgcgcgacggccgcatccagtatcgcgttgctgagccaggcgaagtgctggccgccggagggcgggtattgaacatggtcgacctggctgacgtctatatgaccttcttcctgccaacggagcaggcgggcctgttggcgctcggcagtgaagcgcgattgatccttgatgccgctccagagctggtgatcccggcaaatatcagctttgtcgccagcgtcgcgcaattcacgccaaaaacggtagaaaccagcgacgagcggctcaagctgatgttccgcgtcaaggcgcgcattccgccagagctactggagcagcatctggaatatgtcaaaaccggcctgcctgggatggcctgggtacgactggataagcagaaaagctggcctgaagcgctgacggtgaggttgccgcaatgaaactgacgccgcaggatacttcgccccccgtcgccctgctggaaaacgttggccagcagtttggcgccaccatcgcgttgcgcgatatcaacctggcgatcccggcgcggcgtatggttggcctgattggcccggacggggtcggcaaatcaagcctgctctcgcttatcgccggggcgcgggccatcgagcagggtaacgtgatggtgctcggcggcgatatgcgcgacgttcgtcaccgccagcaggtatgcccgaaaatcgcctggatgccgcaaggtttggggaaaaacctctaccatacgctatcggtctatgaaaacgtcgacttcttcgctcgcctgtttggtcacgataaagcagagcgtgaacttcgtatcaacgaactgctgcagagcaccgggctggcgccgtttcgcgatcgccccgccggtaaactctccggtggaatgaaacaaaagcttgggctgtgctgtgcgctgatccacgacccgcagctactcatccttgatgaaccgactaccggcgtcgacccgctctcccgcgcgcagttctgggatctgatagacagcattcgccagcgccagccggaaatgagcgtgctggtcgccaccgcctacatggaagaggccgagcgcttcgactggctggtggcgatgaacgccggtgagattctggcgaccggtagcgcggcggcgctcaaaaaacagaccggcagccagacactggaacaggcatttatcgccctgctgccggaagcgcagcgcctggcgcataaagacgtggtcatcccgccgcgcgacagcagtgaggaagagatcgctattgaagcgcgcggcctgaccatgcgcttcggcaactttgtcgccgtcgaccacgttaactttcgtatcgcccgtggcgaaatttttggcttcctcggctctaacggctgcggcaaatccaccaccatgaagatgctcaccggcctgttgcccgccagcgaaggcgaggcctggctgttcggccagccggtcgacccgaaagatatcgccacccgccaacgagtgggttatatgtcgcaggctttctcgctctatagcgaactgagcgtacggcaaaacctggagctgcacgcccgcttgtttcacattccggaccatgaaatagctggccgggtcgcagaaatgagcaaacgctttatgctgaccgaggttgaagacgcgcttcccgctgacttgccgctggggatccgccagcgcctgtcattagcggtcgcggtaatccatcgcccggagatgctgatccttgatgaacccacctccggcgttgacccggtggcgcgcgatatgttctggcagctgatggtcgacctggcgcggcaggatcgtgtcaccatcttcatctctacccactttatgaatgaggccgaacgctgcgatcgcatctcgctgatgcacgccggcaaggtgctggccagcgatacgccgcaggcgctggttgagcaacgtggctcagccaacctcgaagaggcgtttatcgcctggctgcaggaagcggcggatgccgcacaaccgaccgtttctgtctctaccacgcccgcgccgcctgctgtcgtatcacaccagcagaacgcgtccccacgccagtcattcagcctgctccgcctgtttagttatagccgccgcgaagcgctggaactacgccgcgatccggtacgatcgacgctggcgctgctggggacggtgatcctgatgtttatcatggggtatgggatcagcatggacgtcgaggatctgcgctttgccgtcctcgaccgcgatcaaactatcagcagccagaactggtcgcagaatatcgcgggctcacgctactttatcgagcaggcgccactgcagagttatgacgaattggatcgtcgaatgcgtaacggcgagctggcggtagcgatagaaatcccgccgaactttggccgcgatatcgcccgcggaacgccggtgcaaattggtgtttgggtggacggcgcaatgccaaatcgcgcggaaacggtgcgcggatacgtacaggcgatgcatctggcctggctgcaggagatggccgggcagcaaagtagcccgaatcgtgatacttcgctcatttccatagagacccgctatcgctataacccggacgtgaagagcctgccggccatcgtcccggcggtgatcccgctgctgctgatgatgatcccggcgatgctcagcgcgctgagcgtagtgcgtgaaaaagagctcggttcgatcatcaacctgtacgtgacgccgaccacccgcagcgagttcctgctcggcaaacagctgccttacatcgtgttggggatgtttaacttctttctactatgcgctttatcggtcttcgtatttggcgtcgcgcataagggcagtttcctgaccctcaccctggcggctctgctgtatgtcaccatcgccaccgggctgggattgctgatctcgacatttatgaagagccaaatcgccgctattttcggtaccgcgattattacgctgattccggccacccagttctccgggatgatcgacccggtggcatctctggaggggccaggtcgctggatcggacaaatctacccgaccagtcatttcctgaccatcgcccgcggcaccttctccaaggcgctgaatattagcgatttgtgggtttcgttcattccactattgattgcagtgccgctggtgctcgggctgagcgtcttgctgctgaaaaaacaggaggggtgatgcgcggattacgcaatatttataacctcggtatcaaagagctgcgcagcctgctcggcgataaagcgatgctggcgctgattgtgtttgcttttaccgtgtcggtttactcctcggccacggtaatgcccggctctctgcacctggcgcctatcgccattgccgatatggataaatcacagctctcatcgcggatcattaacggcttttatcggccgtggtttttaacgccggagttgatcagcgccgatgaaatggatgccgggctggatgcgggacgatacacattcgccatcaatattccgccaaacttccagcgcgatgtgctggccggccgtcagccggaggtgcaggtcaacgtcgacgccacgcgaatgagccaggcctttaccggcaacggctatatccagaatattatcagcggtgaagtgaacagctttgtcgcccgttatcgcgacaacagtgcgcttccggtagagctggcggtgaggatgcgctttaaccctaaccttgaacaagagcgcttcggcgcggtgatggcgattattaacaacatcaccatgctggcaattgtcctcaccggctcagcgcttatccgcgagcgagagcacggcaccattgagcacctgcttgtgatgccggtaacgccgtttgagataatgatggccaagatctggtcgatgggtctggtggtactggttgtctccgggctgtcgctactgctgatggtacagggagttttgcaggtaccgattgaggggtcgattccgctgtttatgctgggggttgcgctcagcctgttcgccaccacctccattggcatttttatgggcacgctcgcccgttctatgccgcaattggggctactgatgatcctggtgctgctgccgctgcagatgctctccggcggctccacgccacgggagagtatgccgcagctggttcaggacattatgttgaccatgccgaccacccatttcgtcagcctcgcgcaggcgatactttaccgcggcgccagctttaccatcgtctggccgcagtttttgattttgttcgctatcggcggcgctttctttaccattgcgctgctgcgttttcgcaagacaattggtgagatggcataaaacctggagcaggcgctgcgccgatggcttatttttgacgattcataaagcggcgcagaccccaggtgaaggccatcgccatactgaaaaggatgaataacagcacaatccagctgatagaaatgcgcagcaacgtgccgggcgtcataaaaggttgaagataaacggtgaaagagtgggctggcgattttcccagcagttgataagtgctatcagtaagccacacgccaacccggcagaacagccagataatcgccggccagcagagcagaaccagaaaggtaaagcgctcctgaatgtaagtaacgatctggcgcagcggcggccagttaagcaggattttcatttatattctcatattgccagccgatgacctgcaacattcatcgcaaggcattccgggcagcatccatacaggcaatctaccctatttgtatatcaaatttaccgtcacttaaaccagatcaagttaacaaagtgttaatgatgtatcacatcaacaccaaaaagagtggataactctgtcgttggtggaaataagcgggaggagagtattaagcgacgggaataaattttcaagcccacaactggctgatttttatggctgatagcagcgcgccattatttcgccgctgggcaatataatggcgcggaaatataagtgggtgattaatcgtagctgctgataattattttcctgtttgcatcattcggtaaattcaccgtttgggtaatcaccccatgagatgggactgccatattttgcgtgttaatgaggtaagtattttgcccacaacgctgttgagctttttcgttaatgatattggtgctgcaggtaggtgtagccacacgcccggagatggttaatgtagcggtatcagcagcgaatgcaggcaagctcaatccataagctaatgtcagaatcccaattagcggttttttcattgaatttataaccagttaacaggatgagaaataagcgatttgctttctatttttctccctcaggagaagtgatgcgttgatgtcatcacgcaggaaagatagtccatataattaataaggacaattatactgagagctattagtgtgataggtattactgatgttaacgaaccaggcgaccgggccggatgttttcccggaggcggcgcaggccggggaacgatcggtagccccggtaagcgcagcgccaccggggagatggcggcgcgtctggccgcaaaacacaaaaacaaaaggcccagtctttcgactgagcctttcgctttatttgatgcctggcagttccctactctcacatggggagaccccacactaccatcggcgctacggcgtttcacttctgagttcggcatggggtcaggtgggaccaccgcgctatcgccgccaggcaaattctgttttcaacacgtcctcaggacgcatcgagtaatctgtatcaggctgaaaatcatctcaaatcgccaaaacaccttcggcgttgtaaggttaagcctcacggttcattagtatcggttagctcaacgtatcgctacgcttacacacccgacctatcaacgtcatcgtctttaacgttccttcaggagacttaaagtctcagggagaactcatctcggggcaagtttcgtgcttagatgctttcagcacttatctcttccgcatttagctaccgggcaatgccattggcatgacaacccgaacaccagtgatgcgtccactccggtcctctcgtactaggagcagcccccctcaattctccagcgcccacggcagatagggaccgaactgtctcacgacgttctaaacccagctcgcgtaccactttaaatggcgaacagccatacccttggggacctacttcagccccaggatgtgatgagccgacatcgaggtgccaaacaccgccgtcgatatgaactcttgggcggtatcagcctgttatccccggagtaccttttatccgttgagcgatggcccttccattcagaaccaccggatcactatgacctgctttcgcacctgctcgcgccgtcacgctcgcagtcaagctagcttatgccattgcactaacctcctgatgtccgaccaggattagctaaccttcgtgctcctccgttactctttgggaggagaccgccccagtcaaactacccaccagacactgtccgcaaccccggtcaggggccaacgttagaacatcaaacattaaagggtggtatttcaaggttggctccacgcagactggcgtccacgcttcaaagcctcccacctatcctacacatcaaggctcaatgttcagtgtcaagctatagtaaaggttcacggggtctttccgtcttgccgcgggtacactgcatcttcacagcgagttcaatttcactgagtctcgggtggagacagcctggccatcattacgccattcgtgcaggtcggaacttacccgacaaggaatttcgctaccttaggaccgttatagttacggccgccgtttaccggggcttcgatcaagagcttctccttacggataaccccatcaattaaccttccggcaccgggcaggcgtcacaccgtatacgtccactttcgtgtttgcacagtgctgtgtttttaataaacagttgcagccagctggtatcttcgactgatttcagctccacccgcaggggcttcacctacatatcagcgtgccttctcccgaagttacggcaccattttgcctagttccttcacccgagttctctcaagcgccttggtattctctacctgaccacctgtgtcggtttggggtacgattcaatgttacctgatgcttagaggcttttcctggaagcagggcatttgttacttcagcaccgtagtgcctcgtcatcacacctcagcgttaataaggtaccggatttacctggaacctccgcctacatgcttaaaccgggacaaccgtcgcccggctaacatagccttctccgtccccccttcgcagtaacaccaagtacaggaatattaacctgtttcccatcgactacgcctttcggcctcgccttaggggtcgactcaccctgccccgattaacgttggacaggaacccttggtcttccggcgtgcgggcttttcacccgcattatcgttacttatgtcagcattcgcacttctgatacctccagcaaccctcacaggccaccttcgcaggcttacagaacgctcccctacccaacaacacatagtgtcgctgccgcagcttcggtgcacagtttagccccgttacatcttccgcgcaggccgactcgaccagtgagctattacgctttctttaaatgatggctgcttctaagccaacatcctggctgtctgtgccttcccacatcgtttcccacttaactgtgactttgggaccttagctggcggtctgggttgtttccctcttcacgacggacgttagcacccgccgtgtgtctcccgtgataacattcttcggtattcgtagtttgcatcgggttggtaagtcgggatgaccccctagccgaaacagtgctctacccccgaagatgaattcacgaggcgctacctaaatagctttcggggagaaccagctatctcccggtttgattggcctttcacccccagccacaagtcatccgctaatttttcaacattagtcggttcggtcctccagttagtgttacccaaccttcaacctgcccatggctagatcaccgggtttcgggtctataccctgcaacttaacgcccagttaagactcggtttccctgcggctcccctatacggttaaccttgctacagaatataagtcgctgacccattatacaaaaggtacgcagtcacacccgaaggtgctcccactgcttgtacgtacacggtttcaggttctttttcactcccctcgccggggttcttttcgcctttccctcacggtactggttcactatcggtcagtcaggagtatttagccttggaggatggtccccccatattcagacaggataccacgtgtcccgccctactcttcgagttcacagcctgtgcattttggtgtacgggactatcaccctgtaccgtcggactttccagaccgttccactaacacacaagctgattcagactctgggctgctccccgttcgctcgccgctactgggggaatctcggttgatttcttttcctcggggtacttagatgtttcagttcccccggttcgcctcgttaacctatgtattcagttaacgatagtgcaacgaattgcactgggtttccccattcggacatcgccggctgtaacggttcatatcaccttaccgacgcttttcgcagattagcacgtccttcatcgcctctgactgccagggcatccaccgtgtacgcttagtcgcttaacctcacaacccgaagatgtttcgtaaaacaccaacgtgttgcgaaaatttgagagactcgaacacacattgactgtgtgtcgtttcaattttcagcttgatccagatttttaaagagcaaatatctcaaacgtcacccgaagatgagttttgagatatatcggcacgcgtctttcactcacgaaccagcaagtggcgtcccctaggggattcgaacccctgttaccgccgtgaaagggcggtgtcctgggcctctagacgaaggggacactgaagtctcaatcgcaagacgccttgcttctctactttcatcagacaatctgtgtgagcactacaaaggcaggttctttaaggtaaggaggtgatccaaccgcaggttcccctacggttaccttgttacgacttcaccccagtcatgaatcacaaagtggtaagcgccctcccgaaggttaagctacctacttcttttgcaacccactcccatggtgtgacgggcggtgtgtacaaggcccgggaacgtattcaccgtagcattctgatctacgattactagcgattccgacttcatggagtcgagttgcagactccaatccggactacgacatactttatgaggtccgcttgctctcgcgaggtcgcttctctttgtatatgccattgtagcacgtgtgtagccctactcgtaagggccatgatgacttgacgtcatccccaccttcctccagtttatcactggcagtctcctttgagttcccggccggaccgctggcaacaaaggataagggttgcgctcgttgcgggacttaacccaacatttcacaacacgagctgacgacagccatgcagcacctgtctcagagttcccgaaggcaccaaagcatctctgctaagttctctggatgtcaagagtaggtaaggttcttcgcgttgcatcgaattaaaccacatgctccaccgcttgtgcgggcccccgtcaattcatttgagttttaaccttgcggccgtactccccaggcggtcgacttaacgcgttagctccggaagccacgcctcaagggcacaacctccaagtcgacatcgtttacggcgtggactaccagggtatctaatcctgtttgctccccacgctttcgcacctgagcgtcagtctttgtccagggggccgccttcgccaccggtattcctccagatctctacgcatttcaccgctacacctggaattctacccccctctacaagactctagcctgccagtttcgaatgcagttcccaggttgagcccggggatttcacatccgacttgacagaccgcctgcgtgcgctttacgcccagtaattccgattaacgcttgcaccctccgtattaccgcggctgctggcacggagttacttctgcgagtaacgtcaatcgccaaggttattaaccttaacgccttcctcctcgctgaaagtactttacaacccgaaggccttcttcatacacgcggcatggctgcatcaggcttgcgcccattgtgcaatattccccactgctgcctcccgtaggagtctggaccgtgtctcagttccagtgtggctggtcatcctctcagaccagctagggatcgtcgcctaggtgagccattaccccacctactagctaatcccatctgggcacatctgatggcatgaggcccgaaggtcccccactttggtcttgcgacgttatgcggtattagctaccgtttccagtagttatccccctccatcaggcagtttcccagacattactcacccgtccgccgctcgtcacccgagagcaagctctctgtgttaccgctcgacttgcatgtgttaggcctgccgccagcgttcaatctgagccatgatcaaactcttcaatttaagtttgatgctcgtgaattaaacttcgtaatgaattacgtatgttcactcagagacttggtattcatttattgtccgaagacattaagaatccatgtcactttgagtgcccacacagattgtctgataaattgttaaagagcagttgcgacgcgctttagcgctctgtcgcgaggtggcgtatattacgctttcctctttcagagtcaaccctgaatttcagaatttttctcttcaaccgaaccggctgtttgtgtgaagtgattcacatctgccgtgtcagtgggtgcgcattatagggagctgctgagatatagcaagccttaaaatacaaaaaacttatcaagcgctcattaattacacttttcacgtttatccttcttgatatataaatgcgaaaacccagtgtttatgcggcttgtagcgtagttacagtcaaaatcgttttttgcgaaaaagtgatttttctcgctctgccgacgccctcataacgctaatggtgaattaagcatcactcttgacccatgacaaagcgccacgctttccctcctttctataatcagagccgtttcttcctactggtaataatctatggcttatcaactcaacattaactggcccgagttcttagagaagtactggcaaaagcagccggtcgtattaaagaaggcgtttccgaacttcatcgaccccatcacgccagacgagctggccgggttagccatggaaccggaagtcgatagccggctggtcagcctggtcaacggtaagtggcaggccagcaacggtccttttgaacatttcgatgggctgggtgaaaacggctggtcattgctggcccaggcggtaaaccactggcatatgcctgccgccgaactggtgcgcccattccgcgtactgccggactggcgtttagacgatctgatgatctccttctccgttcctggcggcggcgttggcccacatatcgatcagtatgacgtctttattattcagggcatggggagccgccgctggcgcgtgggtgacaagctgccgatgcgtcagttctgtccgcatccggcgctgctgcacgttgatccgttcccgccgattattgatgaagatctggagccgggcgacatcctctatattccgcctggattcccgcacgacggagtgacccacgaaacggcactgaactactccgtcggcttccgtgggccaaacggccgcgacctgatcagcagcttcgccgactatgtgctggaaaacgacctcggcggcgaacactacagcgacccggatctcacctgccgcgaacatccgggccgggttgaagaatatgaactcgaccgtctgcgcaacatgatgatcgacatgattcgccaacccgaagacttcaagcagtggttcggcagtttcgtcaccacgccgcgtcacgaactggatattgctccggcggaaccggcatatgaagaagaggaagtggtcgatgcgctgctgggcggggaaaagctttctcgcctgagcggcctgcgcgttctgcatatcggcgacagcttcttcgtgcatagcgaacaactcgacaccaccgatgccagcgcgctcgatgcgctgtgtcgctatacctcgttaggtcaagaagagctcggcagcggcctgaaaaatccggcgttcgttagcgaactgacgcgcctgattaatcagggctactggtatttcgaagagtaagagaacggcaatactgcgggcagccgcctggcgctgcccgcttgctttcagccgttattgcgcatatttcggcaacacgataataaagcgagtggagcgcagatcggactgcaccgctacgctgccgtggtgagcgctgacaatcgattttactatcgccagaccgatgccgctgccctcgcctttgcgctggcgcgaggggtcgacgcgatagaaacgatcaaacaggcgtggcagatgcgcggcggcaatcggcgcgccggggttctccaccaccaggcgaatcttctcggcgctttcgctcaactgaatggtcaccgcctgcccggccggcgtatagcgaatcgcgttcgacagcaggttgctgattgcccgccgcagcatcagcgggtcgccaatcacccggcagtggctaccgacaaaacgcagcgccacctctttctcttccgcccacgcttcaaagaactcaaataccttattcacttcctcggccagatccagcgcccgctgttcagggatcagctggttattatccgcctgggcaaggaacagcatatcgctgaccatccgcgacatgcgcgagaactcttcgagattggaatagagcacctcttccagctcctgctggctgcggctctggcttaaggcgatttcggtttgcgtgaccaggttggtaatcggcgtacggatttcatgggcgatatcggcggaaaagttcgactggcgagtaaagacatcctctatgcgctccagcatatggttaaacgacagcgccagccgttccagctcaatgggcaccgcctgcgggtcaaggcgcacatcaagatcccgcgaggtaatattctggatctggcggctgatttggcgaatcggcttatgcccctgatagactacaaacagcacgatggcgataatcagcaggctgattatcgacgccgcggaaatcagcttcgctttgagttcattaatatagtgcaggtgaaaatcgatcgataaggccatcagcagatgccaggccggtttgccatctgcctgcttgcccagcggcaacatgattagccgccaggagcgagtctccattttatgattatcatgaaccatttcccgcggctgcgggtcggtccatgaaatcacattaccatcgcgcaacttcatcgccagccccggcgtactcataatatggctgagttccgggccgtctggcgactgaaataagatattgccctcggcatcatccagacagataaagacgttagcgtagccgccaatcacgttttttaagatctccagccgccgctcctgcggatagtcggcgtggttgagcaccgtctcaagcgtggtgcttagctgcttgaggtcgtgaacatcgcgctcttcaaagtgggccttcaccgaatggatcatgatccaggtgaaggcaaagaaagcgatgatggtggcgaggctgataaagaaggtcagccgggtggccaacgaaaaggggcgcttagcggccatccggcacctcaagcatatagccgacgccgcgcacggtctggataagcttcggctcgaagtcgttatcgattttggcgcgcagccgcttcactgccacgtcgatagcgttagtgtcgctgtcgaaattcatatcccacacctgcgacgcgatcagcgaacggggtagcacctcgccctgatggcgcaagaagaactccagcagggtaaactctttgctggtcagggtgatacgagtcgcgccgcgcgtcaccttgcggctcaccaaatcaacgctgagatcggccgcctgaaactggctttctactattaccgccgccccgcgacgcagcagagtgcgcacccgcgccagcagttccgcaaaagcaaagggcttcaccagataatcgtcggcgcccagctccagccccttcacccgatgctcgatagtgccaagcgcggtgagcagcaggatcggcatccctttattggcggcgcgcagcatgcgcacgatatcccagccgttgacgtccggcagcatgatatcgaggatcagcagatcgtagtcgctggtcatcgccaggtgataaccgttaaggccgttgtcggccaggtcgacgacgaatccggcttcggtaagccctttggtcaggtactccccggttttcttctcatcttcgacaatcaaaatcttcacggctggctccttcacgcgcgctctgtgcgggtattcaattttagaggagcccctccggatagcaatgaaatatcaggaaaatgacagctttgtcattttcctgtcacgcgttgaacagagcccgctgcgtaaagtatccgccattgataaatcgccgaaaaccgtctgtcgccatgcgcccaataaagcttcttactctcagcgtgatattcgccttaaccggctgtttgtcacttgctccggactaccagcgccccgccgcgccggtaccgcagcagttctctctcagccagaacaaactggttaccacgacggcgggctaccaggagaccggttggcgcacctttttcgtcgacccacaggtaaaaagcctgattagtaccgcgctgaccaacaaccgcgatctacggatggcgacgctgaaagtgcaggaagcccgcgcccagtaccgggtgaccgacgccgaccgctacccgcagcttaacggcgacggcagcaccacctatggcggcaagctcaaaggcgacaccaccaccagcagcgattatgccgccggcttgaatctcagctacgacctcgacttctttggccggttgaaaaaccttagcgaggccgaccggcagaacttcttcgccagcgaagaggcgcggcgcgcggtgcatatcctgttgattgctaacgtttcacaaagctacttcaaccagcggctggcggcggcgcagctacaggtggcgaacgacaccttgcagaactatcagcagtcttacgccttcgttgaaaagcagctgctgaccggcagcaccaccgtgctggcgctggaacaggcgcgcgggatgatcgaaagcacccgcgccgatatcgccaaacggcaaggtcaactggcgcaggccaataacgccctgcagctactgctcggcagctatcaacggctgccggacgatagcgccagcagcgcggtggacctgaaaggcgtaaccctgccgccgtcgctctcctcagagatcctgttgcagcggccggatattttagaggccgaacacagcctgctggcggccaacgccaacatcggcgccgcgcgggcggccttcttcccgtcgattaccctgaccagctcgctctctggcagcagcagcgagctctccagcctgtttaacgccggcagcgcgatgtggaacttcatccccaaaattgaactgccgattttcaacgccgggcgtaatcaggccaacctcgatctggcggaaatccgccagcagcagcaggtggtcaactatgagcaaaaaatacagtccgcctttaaggaggtggccgacgcgctggccctgcgccaaagcctggccgatcagattgccgcccagcagcgctatctcgcttcactaaatatcaccctgcagcgcgctactgcgctctatcgtcacggcgcggtcagctacatcgaagtcctgagcgcccagcgcgacattttcaccacccgacaaaccctgctggaactcaactattcccgtcaggcgaatgaaatcaccctgttcaccgctctcggcggcggctggatggaataacccgaggagttttgattatgaattcactgtctaaaatcgccctgttcaccctgctctctggcgcagtgttcgcggcccaagctgccgaaccgcacgccggcatggcgatgcatgaacaacccgccgccgcgcagacgcaaagcatcactggtaaaggcgtcattaaagccattgatatggatagtaaaaaaatcactatcgcccacgaggccatcccggcggtgaactggccgccgatgaccatgcgcttcaccatcaccccgcagacgcagctcaacaatgtgaaggatggcgacagcgtggacttcaccttcgttcagcagggcaatctgtcgctgttacaggatatccgcgcccaataacggcccggcgacggtagcctacctcaacaactgaatggacgacacatggcatccctgacactgaaaaatacggcgctgatcctcggcagcatgctggttggcggcgcgcttaccgcggcgctgtatacccgactgacgccgacccacgctgccgctccggcggccgagcagcagcgtaaagtgctgttctggtacgacccgatgtacccgaatactcgctttgataaaccgggtaaatcgccgtttatggatatggacctggtgccgaaatacgccgatgaggagagtgccgccgccggtgcgccgggggtgcgtatcgacccgacgcagacccagaatctcggcgtaaaaaccgccgcggtcacccgcgggccgctgcgctacgcccagaccttcccggccaacatcagctataacgagtaccagtacgtgattatgcaggcgcgggcggcgggctttattaataaagtctatccgctgaccgtcggcgacaaagtgaaacaaggcacgccattaatcgaactgaccatcccggactgggtggaagcgcagagcgaatatcttttattgcaggagaccgggggcaccgccacgcaggtcgaggggatccttgagcgtctacgcctcgccggaatgccagatgacgatatccgccgcctgaaaaccacgcgtaaaatccagacccgctttactctcaaagcaccgatcgatggcgttattaccgccttcgatctgcgcgcaggaatgaatatcgccaaagataatgtggtggcgaaaattcagggcatggacccggtgtgggtcaccgtggcggtgccggaatccatcgcctggctaattaaagacgcctcgcagttcgccattcaagttcccgcctggccgggcaaaaccttcagcatcaacaaatggaccattctccccagcgtcgatagcgccacccgtaccctgcagctacgcctgcaggtcaacaacccggatgaagcgctgaagccggggatgaacgcctatctgcaactgaccagcgaaagcgccccaatgttgctgatcccatcaaaagcgttgatcgacagcggcagcgagcagcgggtgattaccgtagataacgagggccgcttcgtgccgaaaatcgtgcaggcattccatgaatccaatggcgttacggccattcgcagcggtctgcaggagggcgaaaaagtcgtcgccagcggcctgttcctgatcgactcggaagccaatatctccggcgcgctggagcgcatgcgcgcgaaggctcctgatgtcacggctcctgccgcccacgcgcactgaggaacggaacaatgattgaatggattatccgccgctcggtggccaaccgcttcctggtgatgatggcggcgctgtttctcagcatctgggggacctggaccatcatccacaccccggtagacgctctgccggacctctctgatgtacaggtgatcgtcaaaaccagctatccggggcaggcgccgcagatcgtcgaaaaccaggtcacctggccgctgaccaccaccatgctgtcagtccccggcgccaaaacggtgcgcggcttctcgcagtttggcgactcctacgtgtatgtgatttttgaagacggcaccgatccttactgggcgcgctcgcgggtgctggagtatctcaaccaggtgcagggcaaactgcccgccggggtcagcgccgaaatgggcccggacgccaccggcgttggctgggtcttcgagtacgcgctggtcgaccgcagcggcaaacatgacctcgccgaactgcgctcgttgcaggactggttcttaaaatatgagctaaaaaccattcctaacgtctcggaggttgcttcggtgggcggcgtggtcaaggagtaccagattgtcgtcgacccgatgaagctgacccagtacggcatcagcctcggtgaagtgaaatcggcgctggacgcctctaaccaggaggcgggcggctcttccgtcgaactggcggaagccgaatatatggtgcgcgccagcggctacctgcagacgctcgacgacttcaaaaatatcgtactgaaaaccagcgataacggcgtgccggtctatctcggcgacgtcgcgcgggtgcagatcggcccggagatgcgccgcggtattgccgagcttaacggcgagggcgaagttgccggcggcgtggtgatcctgcgctccggcaagaatgcccgcgaggtgatctcggcggtcaaagagaagctggcgtcactgcaaagcagcctgccggaaggggttgaagtggttaccacctacgaccgcagccagcttatcgaccgcgccatcgacaacctcagctacaagctgctggaagagtttatcgttgtcgcgctggtctgcgccctgttcctgtggcacgtgcgctcggcgctagtggcgattatctcgctgccgctcggcctgtgcttcgcttttattatgatgcatttccaggggctcaacgccaacatcatgtcgctgggcgggatcgccattgcggtgggggcgatggtcgatgccgccatcgtgatgattgagaacgcccataagcggctggaggagtgggagcatcagcacccgggagagaagctaagcaacgacatccgctggaaaatcattaccgatgcgtcggtggaggtcggccccgcgctgtttatcagcctgctgatcattaccctgtcgtttatcccgattttcactctcgaaggccaggagggcaaactgttcggcccgctggccttcaccaaaacctggtcgatggccggggcggcgctgctggcgatcgtggtgatcccgatcctgatgggcttctggatccgcggcaagatcccagcggagaacagcaacccgctgaaccgctttttgatccgcatttatcacccgctgctgctgaaggtactgcactggccgaagactaccctgctgatcgcgctcctgtcgatcctgacggtaatttggccgctgaaccgggttggcggcgagtttctgccgcagattaatgaaggggatctgctgtatatgccgtcaacgctgccggggatctccgctgcgcaggcggcggatatgctgcagaaaaccgataagctgatcatgacggtgccggaagtggcgcgggtgttcggcaaaaccggcaaggccgaaaccgccaccgactcggcgccgctggagatggtagagaccacgattcagctcaagccgcaggatcagtggcgaccggggatgaccatggagaagatcgtcgaggagctggataaaaccgtgcgtttgccggggctggcaaacctgtgggtgccgccgatccgcaaccgcatcgacatgctctccaccggcatcaagagcccgatcggcattaaagtttccggcactaatctggccgatatcgacgccatcgccgaacaaattgaagtggtggcgcgcaccgtgccgggggtcacgtcagcattagccgagcggctggtcggcgggcgctacctcaacattgatattcagcgtgagaaggcggcccgttacggcatgaccgtcggcgatgtgcagctgttcgtctcgtccgccatcggaggcgcgatggttggcgaaacggtagagggcgtcgagcgctatccgatcaacatccgctacccgcagagctatcgcgacagcccggagaccctccgccagctgccgatccttacgccgttgaagcagcagatcgtgctcggcgacgtcgccgaggttaaagtcgttaccgggccatcgatgctgaagactgaaaacgcccgcccgaccagttggatctacatcgacgctcgcgaccgcgatatggtctcggtggtgcgcgatctgcagcaggccatcggcaaagaggtaaagctgaagccgggcatcagcgtctcctactccgggcagtttgagctgctggagcgcgccaatcagaagctgaagctgatggtgccgatgacgctaatgattatcttcgtgctgctgtacctggcgttccgccgcttcggcgaggcgttgctgattatcaccagcgtgccgttcgccctcgtcggcgggatctggttcctctactggatgggattccatctgtcggtggccaccggtaccggctttatcgccctcgccggggtggcggcagaatttggcgtggtgatgctgatgtacctgcgccacgccatcgaggcggagccatcgctggagaacccgcagaccttcagcgccgataagctcgacgaggcgctgtatcagggcgcggtgctgcgcgtgcggccaaaggcgatgaccgtggcagtgattatcgccggcctgctgccgattttatggggcaccggcgccgggtcagaagtaatgagccgtatcgccgcgccgatgattggcgggatgatcaccgcgccgctgctgtcgctgtttatcattccggcggcatataagctgatgtggttgtaccggcatcggggcaagcgcggagaataagtaaaggcaggcccgttggtatttcaccggcgggccttttaattattagacccacaagcaattacctcatttaaccctcacccgctctcatattatctcatcctctgcgccaatcggccttcactcgacgttattccctttagcttcattgattttcccgctcaccctggctgcgtatttatcacgcggagaaaaggtgggccttaattcaatgagcgctatcgatgaacctgaatccttttccaccctgtttatttttgctgttattactttctgccctgaatacgatatcaccctgccatgccgcgacagcaaaggtggataattgcgaagttggctgcccaaccggcggcagccaacagacgctcttccgcgcggcctacacgctgaacaataaccccagtcgtaaactggccaactgggtagcgtataaaatcacccgtgccagcgaggccagcaaccgtgagagagtgtggaagcaggaccccgatttacccgcagccgataccctggcgcccgccgactatcgccgggccaacaccttactggcggtcgatcgcggccatcaggcaccgctggcgagcctcggcggcgcggaggactggcctgcgctgaactatctgtcgaatatcaccccgcaggaagcggcgctgaatcagggagcatgggcgcggctggaagacgcggagcgcgcgttagccgggcgcccggaggtgacggcggtttattcggttaccggaccgctgttcgaacggcatattgccaccctgcccgccgcgccgggcgtggagatccccagcggttactggaagattattttcctcgatagcggcccacagagcggccagtacgcggcattcatgctggaccaggcaacgccgcgcgatgctaatttttgcgaccatcaggtgacggtggcagagattgagcgccgcaccagtccgcatttgacgctgtggtcggcactgccggcggccgttgccacaacgctaaaaacgcagccggggaggttggcgcgggaaatgggttgcaggtagggaacggaggggtaaagttgtcgacctgtcgcgattaacaatcggcgtcttaccgccagccagcaaaccaggtatagttgccgtctctgccaccgctaagcgctgttgatatcgtatgaagctcggttatttttgttacttcctgctggcccttgccgccgtcggcagcctgttgctgcccaattccatcgccatgtggttcctgctggcgaacgtgctaacctggcttatctacggcatcgataaattagccgcccgtaaagcctggagccggatcccggaatccaccctgctgacgttcggcctgcttggtggatggccgggcgcgattgccgggcagcagtgttttcgccacaaaacccagaagcagccattcagaacatatttcattattagcatcgtgctgaatgttgtggtgctggttggcgggtattggctgtaccgggattatggggtgtagggttggtgtaatttattatcactacatacacgctcaatatgctcaacaccaggtctgcaaacgcagcgttgagcaatatttttttactacctattgctccactttttcaataataaaaccatcacgtcgtaaaaaatcaattacacgctggatattaccaaggccccattggttcgatattgcgataacttcgccagattgaagctcaattaccgcatcttcactcaaatgatatcgattctttcgcccatcaggaacttgatcagccaaaacaattgttcgatttttgagaatttcacccagcttagtataaatgtcctcaaggctgtggggattatgcttatttatccaatcagtaaatagctcaagggctaacttacgcttattataaataccaccattatacctatattcagagtaatctttttcagacttctggctacttatattttgctcaaccagcttttctctgaacttaacttgatattcttctaattctggaaccggaattatttgctctgcatttattagtatatcatcgttaaacttgtaaggtgtaagacgaacacaacgaatatcaacacctttatctctcagccaaatcgctgtagtggtcagttctttcccaaaatcagctgaagcaagaacaattctaacatccttaccaaagtcagagagctcattctcctcaagaccaataaattctaatatttttgctttagcattaacatctgaatcagtacctaaatatgactgataatattcgcatgcttttgtaaaactcattgtagaaatcatagctgcataacgcaatgcttgtaattccatatgagcgccgatttcatctcgctttaactctattacgacaagattagcctgcttatcaatcgctaataagtcaatccgtcttctgctgtcctcccaatctgaaaactcctcagcaatgacaagacaatcaggtgcaaggatatcaatattattttttatagcttcttgcaaatcgtaacgttcctgaagcccctctattgagtaggtagttttttccagcgcaactaaatttttatcagcaatattatataatgccatttttcaaatccgtttatgaaagtattactatgattgtatcagagtttttaattcatctggcgtatatggcgggtttcgccgatgcagcatcgcgtgacagttggggcaaactgggatcaggtcagttttcggatccagacgatagtcctgtttaatctccgatagcggcaccagatgatgaatgtggataaagccctggccgatatcaccgtagcgcttcgccatatcaaggccgcacacctgacaccgggtaccgtgatagcgcaacgcggcctcgcgggcctggcgatcgcgctcatagcggttaaccataacctgaaccgcagccccttctacaaactcacttttcgtctgtagctcgtcggggaaaggggtaataccagcatcatctactcgctcctgaacgatcttgaatccttgctccagcaacagacggacgcatttggatttgatcccaccgctgaaatccgccggcgtgaactccgttttcgtcgccatagtggccgctatcccaacgatagctttagagggataacgacgtccttcgaattcgacttcatacagacgcgcgtctttaaactgatgcgctataccctcgtcgtacgcgcggatggcttcgatgatgcattctcgcgatagatgatctggcaaccgtttcatatggctgagctatttgatgatgagtgacctcattatagatagaaagcagaataaatttcgaatagataaatcatggtgatagttgaaaagagacctgggttggatatcgaatcccggtggcttgatcgacagcagttttgcgagcatcatcgtaattatttagcaaaatacgtaacgcgatgccttccagtaaaactctgcaacaagcgatcgccaatatcactatctggcgcaaaggcgaacagcgcgcgccgcataaacctctgctgttgttgcacgtgctgtcgcattaccagcacggacattcgcggatgttcgattacgcctcagaggttcgtgatgagttacatagcctgctggagcgttttggtccacagcgcgcgcaataccgccccgatatgcctttctggcgtctaaaaggcgacggcttctgggaattacgcaacgctgagcaatgttcaactgaaggcagcagacagcccccctctaaagaactggaaacctatcacgtcgcgggcggctttgacgaagagcacttcgcgctgctgagcaagaataagaggctgattaacaccctggcgcatcagatcctgcaggcccatttcccggagagtattcaggaagagatcgccgacgagatggggtttgatatccagcaaattcgcaaagaacgagacccgctgttccgccaacaggtgctacgcgcttataactatgaatgcgctatctgcggctttaatatgcgccatgacaatacctccgtcgcgctggaggctgcgcatatcaaatggaagcagcacggcggcccatgtgaaattcccaacggcctggcgctatgcgccattcatcataaggcgtttgataaaggctcgattggcctggatgagcatatgcgggtacagatttctccagcggttaacggcggcgggattgtcggaaagctgttctgggattttgatggtaagcaaattggattgcctcaggggaaggactgttacccgaaagagggatttgtggagtggcacaggagagaggtatttaggaggtgaggtaaggcacgtgactatatgtcacggaatagcccctcccctattttgtcaacgtcccggtacgatcaataaaaaattcgtggacataatttttcccatttagtccgtaagaaactgcataagaataaccactcttccatttgaaatttatacaatcatcaggataagatacatttaaaccttcaccgtatctaacggtatcatattttccaccctcatttgattcaatacgataataattaagaacatctttctcatccgtactgaaacagagatgttcgccattaataatagtagatcgtggttgtggcgcagggttaccaccaggacaaccagaaataagaaaaacaaatggtagaatagctaatatcttcataccggaaatcctttcattactgatttatatttttcgatcaatgaatgggcagactcatcaggatcataatctcgatacttgatcaaattagtatttcctttaaagccatagtttaacaggagccaataatcactaactaaagaggcttgctgttctaagccgtaatggcaaatatcagctttatctaagctatagctgtaatcagcgaaatgagagaataatcctcttgttctgacaaacatcccccgctgtgcttgccatacatgcatcatttcatgcatgaacctatgtttcttttccaatatatccattgaaaaatcatgcgaataggtatcttccctaaaccacatttccccgttagggctcatagcaatatcaataggttgtagattaaatggcaaataactttctcgatgaatccacactgtattgtaccgaatcccgcagttgtatagagctcttgataacccaatctcaccagtggttataagcctcgttccaccgggcttaatacgtgtcccggatgtcgcgttaatcctctcgtttacaggcattcaaaatccctctgaattgcaatggtattgtttgtttatcgtacgccgacgcaatcgacaaggaaaagatttttatccgaaaaaatttgcagtctacttagcttaattactgggaatgcagtactcgcattcgttacacgaagcgtttaaagagatactgaatttccggcacaaaaaagatgtcttcgggtgaattggttgtcgattgggttcgaaggccggactcgaaccggcacgtatttctacggttgattttgaatcaaagcgatcgggtaacttaacctactaacaaatcagcgtttttatagtgaagcccttttcagacaacgaaaaaggcactggttatgaaaaacgcagatgcaattgatttaccaacactaattgccgccattctttccaccaaaggtggcgtggcgaaaactaccgatacggctaacctcggcggctacctggccgatcaggggttgaaagtcctgatgattgatgccgatatccgccagccgacgctcagcagctattaccctcttgataacgaagctccaggcggtatctacgagcttatcgcgcagaacgaactggatccagccatcatcatctcacacacttccattcctggactggatatcatcatttccaacgatccgcgcggcgaactgatgagcctgcttcaggctgcgcccgacggcgtaatccgcctgcgccatctggtacgccagataaccggctatgacgtcattctgatcgacaccattggcgcacgcaccatcgcactggaaatggtgctgttagccagcgatctcattatctccccggtattaccggaaatgctctccgcacgcgagttcctgcgcggcacgctacaaatgtaccgggatctccagccctttacccgctacggcatccctctgccgccgctaaaggcggtgatcaacaagctcgaccacaccaacgacgcccgcgaaattcatcacaacctgcttcaggttctccagcacaaacaaaaggagcaggagctgctggtgcccaccgagatcctgatgacgccagtttacgccagcgtggcctatcgccgggcggcatcgctgggtatgccggtgcatcggctggatgctgccagaccgaaaggccgcacaacaccttgcgccgccgaaaccatgcagatgctggcaaaagaactgttcccgcagtttctcgccctgccccatcaacagatggagggcatcgcatgaaacggaaaatctggcgagcattttgctcttattacgcccagcatcccttcgagaaagacgatgaagtgatcgtgttctttgaagctgccgatcgtgaagaagcgcgggaaacgctgccggtattaatgtcgctgctctggcatatcccgccggaaaaagtggactgctacaacctggaggatgagaatgagctacgggatacgtccggttcactgacgtcccccagagactggccgttatttgaaatcggctggtccaacaataagccgctctactccagcgatttaccgttattactgctgccgccgcatcaacagacccgactatgggaagcctttctggcctgtcaggagggtaatcgagatgagtaagcgcaagcggccacaaccgccccactccgtcgaagcggaacaatcggtgctcggcgggctgatgctggataacgatcgctgggatgacgttgccacacagatttccgcgcaggatttctttatctccgcgcaccggacgatttattcccatatgcaaaccctggtcgaacagggaaatcccatcgacctgatcacgctgagcgaatcgctggaacagcaggagcagctcgaacaggtgggcggcttcgcctacctggcagagctttccaaaaacacgcccagtgccgccaatatcattccctacgcgcaatacattgccagctacggcgagctgcgccagcttctgttactgggcaatgaactgagcgatatggcaggccagccgcgcagcaatgtggccgatgtactgaactttgccgaacaaaagctgtttgccattgcgcagtcgtatcaggagggcggcctgaccgacatcaacgcctgctttgacaacgtgctggcaggcatcgctcagcgctacgaggctgaacgtggcagcctcagcggcacaccttccgggctggaacagctcgataccctgacctgtggtttccagcctgccgacctgattatcgccgctgctcgtccctcagttggcaaaaccgctttcgccctgacgctatgcgtgaacgcgctaatgctgcgccctgctcagccagtgcaaatctacagcatggaaatgtcggcggaacagctactgctccggctggtttctctgattggccgcgtctcacaaacccggctacgcagtggcgatctcagtgataacgactggcagcagattggcatcagcgccaacgttctgatgacagaatggaaagatcgcctgctgctcgacgattccgggatcctcaccccatccctgttacgcagccgggccaggcgatcgcttcgccagcatggaattccctcgctgatcgtagttgattacctgcaactgatgcgttgcggtggtgcggaaaatcgcaatcaggagatctcgacgatctcccgctcactaaaagcgctggcgaaggagcttaactgcccggtgctggcgctgtcacagcttaatcgggcgctggagtcgcgccttaacaagcgcccctgcaatgccgatctgcgcgattccggctctatcgagcaggatgccgacgtgatcttattcctctaccgcgacgagctgtacgatcccaacacgctggatcgaggcatcgccgaagtgattgtcagtaaacagcgcaacggcccgataggcacagtgcgaacccgatttattagcgatcaaacccgcttcgaatcgctcagccagcagggagtggagtcatgaacaacaagctgacttcgacggaacttcagtcccgcctgctacagggcaattttgatcggggaagatcgctcgatgaacggttcgccgatccgctgacggaaacctcgatgatcgtcacgctggagcagcttcgcccttacgatctcaatccgcgactgatgcgtaaccccagctatgacgacatcaaggaatcgatccgtcgtcgcgggctggacacgccaccgccgatcacccgtcgtcccgatcaggagtggttcatcatcgccaacggcggcaatacccgcctgtcgatcctcaatgaactgtggcgcgaaacgcatgacgagcggttctggcgcattcagtgtctgtacaagccgtgggccggtacatccgatcaacccatgctgggcgaactacgctgcctgatcggccatctggcggaaaacgatatgcacggcaaactcagcttcatcgagcgggcgctggggatcaacaaggcgcgggagctgtaccagcaggtggaagagtgtcagctttcacaacgggagctggcggagcatctgaagagcgacggctatccgatcaaccagtcacacatcagccgaatggaacaggcgctggagtacctgctaccctgcatccccgaggtgctgtacgcggggatgggccgttcgcaggtggaaaaactgctgtcattgcgggcggcatcattacacctctggcagcgtcatgccgccgaagacgtcggttcatttgacgatctcttttcctccgcactgtcgctgttcaacgaccagcctgaagactttgccatcgagcgggtacaggatgagctgctggggctgatgagtcaggagctgaacgtcgattacaacctgctgttgctggacgtcgatccctctgagcaaaaacgtcaggccgtgctcggccctacacctgaaccaccgccctatattccaccggaaaaacccgagccacgcccgatagcgcgcagacgtaaacctgaaacagaggaagacaaagttggcgcgcccgctcctctgcctgaaccagaagaagcgccatcgctattgtgtgaagggaccgaacccgttacggatatctggcgcatcccacaactgtgggataccacggaatccttgcgatcggtcagcgatcgcctggcgtgggatctggctgaacattacgccatcgacgaccggataatttcagataccgatgtaaatggcattggcttccaggtgatgccatttgcatcaggtcaccccatgtttacccggccacagtcacgcgcctgctgggcgctgctggcggcactcaacgagatcccgctaacggaagatctggcctctgcactgacgcctacgctcttttttcaacacgatgcagacggcttcttcttcagcgatgaatttcttattaaagcattccgactgatccgtattgtccgccggatcaaagagtttcagcaggaggcacaacatgctgccgacgattaatcaggccgttttgtcacaggtgatacaagccctgaaggacggcaatgtgcgctattgcgaagcgctgggctttgaccgcgaggagctgaacgaactgaacgccctgacctttgaagagctaatgcacatgggcaacacctcggcgcagttcctgaaaatcaccatcaaccatgacgtgctgcgcaaaatgctggttcaggtgcgtcaggagcagaaattccagcaactggtcggccaggcggtgcagcttggcggctcaatcgcgttaatcagccactactttggtatctcgaccgctgaaatcagcgcccgccgtcggctgatggggatccacgttcgtcaggggcgcaaccaggttcccggcgaagaagaggaagccgcgctctggaatcgctggcaggagatcaaagtggataacatcgactctataccggcactggaagccatgatgctgctggcgcaggaacgttcgctctcgctgacagtggtctggaatctgatccgacagtgggaaaaaagctgagtgaccgaggggaagatcatgacaccgtatatccaggcgctgatcgctatgaccggcgacaaactccagcagcggatgcagaaggatccgacatctgcttccgatagcctgctgtttatgggcaatcagcatgacacggttccgcgtcgcctgttgcaggatccgttgctatcgcccaaagataaattcgcctggcaggtgatccgaatgcaggcgcaggacaacggcggcgcagtattcccctcctacagtgaattacaggtgcagctctcgaaccgcccgcaggatgaaaaagcctcgcgcagcaccgtcagccgggcattgctgatgctacgcctgacgcgctggctcagcctgtgccataaagcgcgggatcgggtatccgggcgcatcctcgggaatatctatgccctgcacgatgaaccgctcaccgtgctagatgctgtgcgttttgatgccagctatcttcatttgctggagcagtgctcacggcatgaaaacaaagccattcgcgccactgcacaaggcatcctgtacgacattcgccaggacaccagtctgcgctatttatcatcgcgtatagaactgctggaagaacgcgcccgctggcagcagcgccagtcccctgaggagactaagccagaaacgtccggtctcaatacggtaccaggcaaaatttcacctggtaccgaaacgagactaagcctgaaaccggggcctgacggcgtagtctcaaatcaggaccaggctcctgtacgtactgtacctacagatctttgtaatagtactaccgcgcgcgcgaacgactcgccgccgtactggccgccggaaattccgttaacacaccctgaaaaacagctggtcttgcaggctatgcagaacctgtcctccccgctgcgccagaacgtgcttgacgacgcagcccaacgcgttgcccgtggcggcatacaaaacccgctcgcctatctgctggcgacactacgcaaggctcagggcggtgagtttaatcagtatcgacgcggcaaagcgacggtgccggagtttgtgcggcctgtggtttcagagccggaaataccggttgagccgcgtaaaaaacgggatatcagtaagttggttgcggagattcgggcgcagtgtttggggagtggctaatcaactaatttttcatgtgggaggatgcggtgtaaatattgcggttctcccacagtgaaataatcttatgttaaaggtgacgtaggcggcttgtgaaagaaggcattcacgactcttttccagcgctccacgtatacccaaaaatttgctggctcactgctgagcccgagttgacgatagtcagaagccatagcactagttaaacgctttcttagtattggcagtgcgttccgtttctcgtctaactcctgacggtacaatgttaactcctggtgactccattttcggttatcagcttcggcgataggattcatattgttataaggtgtcattttcgtcagagtcccaagcaatggtatgagcgctacaatccatgcctggtactctttaggccgatgaaattcaagcttatgctggcaagcagtaatggcatcaaaatcaataacaacgcctttctccctatatgctcttagagcatcctgaatttcctgttcaggaacactcccttccgattcagtagtaggtataaaatcatcaagggtatgtaacacagccaacgacacacggttaatatccttcaaaacgttggagcattcagtgaagagcagttctagtttttcagactgaatttccagcgttttttttcgcaattcattacgcagtgtaaatctagcccctagccaaacggcagtcagcgtcgcaacaggtgtgataatttctttccattcgaaagccattcttttttctcctttaggctccagaaaagaaacaatcaaatatcacatcaagcgatatccctgtaagcacaatgagctatccgtagtgcacttcaatttaaatgctcctgaaattcctcttatgcgttattcccttccagccaaacgcctacactgctgccgcataccttcaaaaatacactcagcaagctcaggtggaaacgactctggaagcaacatagatacacgctcaatgacttctggcgtgctggatataatgtcatccatcatggactcaacttgtcgccttcccaatccggttaattcaccatgattgatccaatgccgccgttgaattctataaatgtggtaataattactgctaccgcgaacagccattgccagtttgcatctctgccaggaaatctgattattaccatgaccaattaccggccatgctgataaaacatcgtaaagaggcgtaaggtggtaatgactttgtggctcaatagcgatactgaaatttttggcatggccgtcagtagcagccaacaaccagaaaataatttgcgccctgaagaactgctctttgtcctgctcagcctgatctgaatgactcaatatgtccataatatcggaaatacccggcccaccatcagactggtattttcgtaacggagaaacacctaaagcctgacacatatcctcttggggcaaacgaatgatccattgccgatcgcctgaccatcttctgtcgaaacgctcaaccactaatgccttttgatcttcaaactgcgcaatctgcgtttttgctacagggatcccgtagtgctcaagaagcaaagaacacagccattcattttcaaccgatgtactcatatccgcttgcatgttcccaaccaacccaagcggtagcttgaagatatgcgttgttggggtattaccttctggtaaacaccattgttcttcatgccacaataaagccgttttttcctgcgcaccggcaattgataaacgcaaatcgtcagtttcgtcctgccgaccaggcaacgatgccgccgtagtattacgcaatgtagtggctatatcagcttcagaaagtgggcgataatttacggaaaataaatccgtgggctcttcatcaacatccagtaactgtattgcgccaacgcagtctcttcccagctcagccaatagatcaaaaggctcaaggctttcagactggtaacgtacggctaaacgcctgcgtataccttcgctgtcaggcaataaattatcaaaatagtcacgaacaacgttaccgcgccaaagctgattaccgggagtgaaaggcaaagaaagcgataaaggtcttccctgttcatcaactacccattctggaagatattgtaatgaatcctcgcctctggccttctcccagaatccgacccggattccattcatccatattgctaaacgctgctgtgttcgacgcatatcgtcaccatttttcccttctggcaggtgaatctttttgttgttctgattcatccattgttgaagatgacatcgaggaaagtatctgtggtccagaagagagtaccatttcaacacccagcacggtaaataccctgaatagtcgctccatactggcactggctggattcgcttccagtcgggcataggtttgctgagttactcctaacctttcagaaacttccttttgtgtcagtccattagccttgcgaaagccaatcagcaatgggcgtatttgattcaaagttttcaacggataaacagtattcataaggcatttaccattgttagaagcgctgatacagtctataagctgtttttaaacaatacaccctataaactgtaaatgcaaaatacagcctataagctgttaagataataaaacaccctataagctgtaaaaagaggtctctttatctgatgagttctcatcagcagcattctgaaacgggaaatgataaagccaccatagttacccaatcctcaattcaagtttttcgcgcgaaaaacttgaagaaaagatgtgaaataattctaacgccaggtgcctaggccaagagtgacaaaaatacgctttgatgtcagtggcatcacataaacgcctatcgatccatcaccaatcaataggtaaaagggtgatgccactggcatcacataaacacctatcaatccggcgccaatcaatagataaaagggtgatgccactggcatcaataccccaccgtattcagctaaaacttccgcgccccatatacaaaacaacctgttcgcccctcccggatttccccagactccagcacaatcgctacagggagatcccaatgaaaatcgcgccttacctgataacactgacgctaccgtttatctcgttatctgccaaagctgattaccacactcaaattaacgccggaaataccgtttctggcgatattgttgatggctcaaagggtaatcagcatgtctatggcacgctgactaactccaccatcactggtccctatgcctatagctacgttggcgatggtgggcaaaccaatcacatcacggttaccgatcacggtgaactgtttctggaatcgggcggcagcgcttatgacacacagataaccgacgatggtgatctacaggtgaacgggtatgctgaaaacacctatgtggatagtggcggacaggtttacgttaacgccggaaataatggcattgaagatccagaacaaggcggacagattgtgaataccacggttggtgcaggtggccaggtcgttaatcgctacggcattgacacaaatacggtcgttgaagctggcggcgaactggataccggctggaattacccttatgaaattcgcaacaccgctatttcccggaatgccgttatacaaaacggcggcattcagcaggtcagcaacggcgggacaagcgaaggcagcaaggtcaatgatggcggcacattaatcgtcaccggcacatggcactacaatgttgtcaccgacagccagccttcggcctggtatagcggcaccgcagatgacagcgctgtttatggcacgatgcaaaatcagggcggactcgatgaaaacactacggtgcagtccggtgggcaatacacgctaagcggctatggtctctcccaccagctcaccgtagcacagggcggcagcgcccaaatcaataatggtgttctggatagcttctggctttatgggatgatgaacgtcagcagccaggctacgctaacaggtactggcactgtgggtagtagtggcgaactggtactcaacgaaggcgcaaaaacatccggcctgaccttagcgctggatggcgtactatccctgcaaaacagcagtgatgctggtccgcataattatcagattgcaggtctggagatggatggcggtacagtgctgtttgacccagcctctttcgccacactgaatatgaaaacgctctctggcaacggcaatttctggatgaataccgatatagccacgcaacagggcgatatgattaacgtctctggggaagccaacggcgattttgggatctggataaatgatactggcgacccccccgcagatccgcagtcgctacaggttgtacaaaccggtggtggcgacgcgcagtttacgctgttgaacccaaaccagcaggtagacatcggcacctgggaatatggcctgacacccgacggtcagggcaactggtcactgacgccgcaggcaactcccacgccatcaactgaagccgttctggcgatggcaaacgtcactcccactatttttcaggccgaagccagtgcgttgcaaacccgcctggacgttactcgttcccgtccgcatcagggagagctatggatgcaggcgctgagtaatcgctttgatgttaaccgcacaggcaatgcagcttatcgccagcggctcggtgggctgatgatgggctatgacagaagtcttcctcgccagactggcctgcttacactaggtattgcaggcggttacagccgttccgatcttgatctcatcaacgacagcgatggttcagtagacagctacagtgccgcgttatacgccagctattatgatcaaagtcgtttctggctggacgggatgctgaaaggcaacctgtttaaccagcaccttaatgtccgcatgagttccggcggctatgccgacggcagttacaccatccccggcttgggtagcagcctggttgccgggtatgacgccagattcgccaataccaaactttctccctttgtcggtttcacaggcttcatttcacaaagtgataattactggctatcgaacggtatgcaggcacatcccggcacggctaaatctgcgctggggcaagttgggttccgtctgcgtcagaatataacgactcatcatggaatgcagttcattccgtggctgaaagtcgcgctggagcaggagtttgtgcataacaacctggtcagggttaatgacgataacttcaataacgatatcgccggaacacgaggaagctaccaagctggcatcagcgccgctcttacgcagcacacgcatatttacgccagcataaattatgagaaaggtgacgggatggaatcgccgtggactggaaacattggctttaattatagtttctaatatggcatttcatgtttatatcaattcctatatccccattgcttttacaatcaaatgagaacaccattcattatcttaacaatagagatgaagtcaggagacagccatgtcattgctagagtcatttgggaaagcattaattatattgcttgaagcatttttagggaaacgcaaaggtcaggaggaagcacataataaattcttaaatgaatatacaaaagaaaactgcaaccatcgtttggttgaatattggttttgtcagttcacaggatggcgttacgcaaagtaccgggatatttgttttataatgacctcatccgacccatcaaaaatattgtatatggctaaaggtattaattacattgcccgtacagtagagtttattgatagcggagaatgtaaactatctgatagatataaagagaagaaaaagcatacattcctctttttattcatatcattcctgatcattttcttcatattaattgtctggatgatatcctctgtaatgtctctgataacgcattatcatgatgtcacattaatggctataaatatttcatcgataatagcaggtgcgatttttatcatgtgctttgcattctttattcatgcaataacaatggagttttttgcctttgaaaaggcggagcattttgtaaaatcttacaatgcagaaagaacaccatcaggtcattaatgcttgtctctatattaatgctactgccacctatcaatatccaccaaccgataggcaaaagggtgataccagtggcatcaaaatttccgacaaacaatctcctcgcctgcgttgccgttttcccattgcttacaatccctcacgccatcacttttcgctgacgccccaataacgccacccggctgcggactgggtggcgggtgtccgagaaaagtcctgctccaacaacctaaatgcagctgttgtcgaaaatattacataggatactacgtagttgagttaaaatatggacattacgcattataataattcattctctataatgaatgaattatattaaccgatacaaacccatttctagtgtttcaaagccttaatcaactctggcgatgctttaagtaaagctgcaatatccattttttcgtacttcaatgtttctaaatcagaagttgtttgacctttttctagaataaagtttctttcggtcatagaaatagattttattattttaaacttcaaatcagtaggcaaatcatgtgccattgtcaaagatattttctttgcttcaatgtttgttaattcattttgtatatatttgatttcttgaagattctttctatatagattcagaaagaaaaaagacagcaactcgatcccaaaactcacaccaagctttgacatcatttcaattaagagtactgttttgtcagtatttacataatcagtattaaatacaaaatataataatatagatatccctattgtagctatacttataccaataaataagtttataaatgacaccgtatttaatgaactagctctttgattgagtctggtttgcatatcaagaaaataatccttaacatcaattaaagtagtattagatttaactttctcctctaactcacaaagcaaacttccagacgcttcattcttcaatgaactatatatagtctcatataattcatttctactatcgccatcaagataatttgtcacatcttcatgtaatctgccctgttgctccctgcatgcatcaattgccttttgcaacgcggaaatacgaatttttaatgaactatggctatcaggctcatagtctatcgccttaatttttctcgatgaaatgacaccaatcactccggcaaagaatactaaaattatcggtaaaataataaatggcgttttattttcgctaagaaattctgtcaagacaataggtgtgcctattttcactaatgattgagttaaatatatcaccatagcaaaaaatacaaatgattttaataaagcatgaaaaaccttcacccctaacttccggttcttttctttcttgtatttctgtgcctccagataactttctctgaaagcattagtgggattttttcgcattgttaatgaagtccactgagttaaaaactaatattctactacatatacatattagtgaatagtcataaactatctaaattaataaggaacgctagaagggcaaacgtaaagcaggataagcaatagtgtttttaaaatgattaaaattatttaatggcagtattagaagagaataaacaatcaccatgtcaattaatattgccgatttcataacccctaaaaattttcccgtatgcgttttcgttttcccattgctcacaacccctcacgccatcactctgcgctgacacccatccgcaacaggaaacacatatgtcggactacaccttcaacatgggtcccctgcgtagtgcgatccatattcagcttcacactcacaacgccacccggctgtggaccgggcgacgggcaactgagagtggccctgcgccaatcatcggaatgccgcgctttatcgaaatccttaatcagatgcgcattgccgcagaacataacgatccttacgccgatctgtggatgctgcgcatggaagagaaactggtacagtcgcgtaaattgatgcaagtgatgctggatcaggcaaaagccatgttcagcgaattgccggaaggcatcgatatcgaaaactgcttcaacgtgcagcccgcccgctttccgctgtttatcaacgctccactggcctatcagggcgtttatctgctgaccgacttcgaccagctcgcacgccagcttctgctggcctcgcatatcgccgtcatctcccgcagggaaatgcacaaccggttaaataatggcgcaacggttattcgcagcgccttcggtctggcgcagaaatatcacggctccgggctgacccgtcaggattttatcgacgatacaccgcaggccagagccgccgtggaacgtttaggcccgttgccggaagcgatactgagcggcaagctgcgctcatcgttttcatcaccgctgcctggcaagaccgacaatcccggagctgccgatgatgaataactccataaccagctatcagtcgctggctgatgaagactataaaatgctggcttacgtctcctcgctaaaaggccttttaaagccttttaagagtaagggggagttggagctgctggagagcaatgcacgaagcgtgcgcgagatgatggagccattgatgcaacgtctaatccagagcgccagacgctaccccgtgcgccagcttccgctgatattcaccatcggcccagccccttccggcgcgaacttcctgcgctggcgcaatcagcagaacaacaaatccggcactccggcattctgcaacctgattggcaatcccaaaatcccgcaacgtgccagagatgccctgctggaaatcgagcgggatcgcattgtgttcaatatgcagatgtcggtactgaccttcattatccgccaggcacgggagtgtcaggaaaaaatggaacaggcagaaatgctgtatcaggggcaacaaaatagctgacgcagaacatgagttgcagcacgacaccaggcggctacgccattaccctcacgccatacccaacagcgcggtttgttttgcctgttcgcgctcgtgacgctcccgtcgcgcaaaacaacctttacgctcctgttcagtatcattccgggtggatagccaggcgacagccgtctcgctatccgcccggaccgcctgcatttttccggtgcccaccggataacaacgggatccgtttgtgcgcaagcgccagttattgcgatttacactgctgacagaaatcgcgcgtaaccctacgcggccagtgccccttcagcccgctgcaccttaacagcctccgtgcggaatacggtatttaaggtgcagcaaacagaatatcgcctcgcaatttcccttccccctcgtttaaatccccttgcttacctggtagtcggaacctgcacgctacccgccgtaaggcgtggttccaaatccttttaattgcgcagcatcacacaggcgcatccctttcacccgatgcactctgcacatcacttagcgccgcgttcagccacgcgggaggatcctatgagcgagaaaacttacttcaatctgtacaccagcggtctgggttacgttaaccgtgtccgcaccgtcaccccaaaacgcggcgagccctttttatgctgtgatattgccgcattaagcggggctgccgatgacgtggactatgtccgctttgactgcaaagtcaccggcagcgaagcgcgtaagctgattgcccgctgcgagcaggcggtcaatgaaaagcgcaaggtgctgatccacttccgcctgggcgacttatacgtcgatatgttcacctacagcaaaggtgagcgtaaaggcgaaacgggcgtcagcctgaaagcccggctgctctatattggccttgtcaaaattgacggtgaagtcgtctggcaggccggaaatcaggaaacagaggcagaagatgatgccgcctgaattttcattgcgacgcccgctccgggcgtctttctttcacaaccgaaaaacaatttcgcgttgtttgccttctcaccattgcgcaccctctggctattcctcaccagattcagagagacaatggcgcgaacaacgggatgggttatcacactgctgatgctgggcggctgcaccgcgccgcaacagcccgttgcgcctgcaccaaaacccgcaacaccacccgcacctgaagtcgtacgctatgaccgttacctgctgatcaacacccaccccgacgaggctcagcgcaacccgctgcaccaaatcgtcaacatcaatctgccgctgaacctgaagctcaccgttggcgacgccttcacctggctgctgaaacagagcggctacagcctgtgcgtcgatgaccatcccacgcagtttctggcaggcaaaccgctgccgctttcgcaataccggctcggcccgatgcggctggaagatgcgctaaaaacgctggccgggccgggttggctgatgcagaccgatgtactgaaccgcgaagtctgttttcacctgaacacgccgggaacgggagaccatcatgcttaaacgtctggcctacctgactaccggcgctgctctcctgctgctggcggcggcggtgttctggtgtttcaactgcctgaacaccctgacgctgacgcagcaacagacacaacgccagataacacagtggcgcgaccagccgcagccggacagcgattatcacgagctgaaggttgccgtaaaaaacatcgccgatcgcacggaagcccttgccagacagcttaacgatgccgccagcgtgcaggccgaacgacttcaccccataaccgaacagctcagagtactggagggacaaatccagaccctgagcgccagttatcaacacctgcaacaacagaccgccacgtgcagccgcgcaaaggcaaaacgccccgtcccctctccgctttgggccgcaaaggcccctttttctcttatcagcagcgagtttcgcgccgggcggcagttcgccgtcatcgcgccatccggctatcgctcgctctcacagcttcagcttgttgcccccggcgacagcgtgcagggctggcaactgctgcaactggacggcagtcacgcctctttccgtaaaggcggtcagcggctgacgctgaacaccggaggataaaccgcaatgcgcagatatctaccactgtgccttttgctactgccgctgtttgccagcccgcagcaaacccgtattgaagaacaggccatcactcacacgcaggcacagcagtgggggctgaccgacagtgaatggcagcgctaccagcaactgcatcagggcgagcgcggcatctggtcgccgggactcgatcccctcaccacccttggtgttgaagccaacaacgacgccgaacgccagcgcttcgccgagctgctggctcgtaaagagcatcagcgggtggagaaagagctggcgttccagcgtgcctacgaccaggcgtggaagcggctttacccgacgctgacgcccatccgcagtgtcgtccagccacgtctggcgctgttcgtcagtgaaaaatgcccggcctgcgagacgctggcgcagaaacttatcaacgacgaccgtccgctggatatctggctggtcaacagccgtaacgacgatgccagcctgcaacgctgggcgcagcgccagcatattgatatgcgcaaggtcgaacgcggacagataacgcttaatcacgataacgggcgctggcaacgcctcggcggcggaaagctgccgctattgctggaacaacagggggagcaatggcgtcccgtctctgcgccctgacagtcggcctgcttatcagcgcccacgcctgtgcagtaccaccgctgtatgcgcaaatcgcccgtcagcagcaggttccggcagagctactctacgcggtggcccgcgctgaaagcggcacccgactggcgcaggggctacacccgtggccgtggacgctgaatattgccggaaccggctaccgctaccccagccgttcttcagcctgccgggcactgctcgccttcgctcgtactcgcagcctgaaacgcatcgatgccggactgggacagattaatctcggctggaacgggcaatggttcccctcgctgtgcgccagttttgatccggcggacaatctcaccgtcaccgccctgctgctgcgtcagcactacaatacctcccccggaagctggctggacgccgccgcccgctaccaccaccccgccggaggcaaacctgccgccgtctaccgccagaaaatcgaccagcaaatccggctgctctccgcatcagggaaatcgccatgaaacaccttattccagccatgctactggtcgctactgccgctattgccagacctgccgttcccatgcaggcgctggatgaggcccggttactgccagtcatcacccacaatctgcatcccggtcagcaaccccgtctggcgctgagcctaccgggaatgacgccgctgtttttaatcggcgacgatccgctgtctacagaatggctgcgccagcaccgggacgcattaaaaaccctgcactccaccgggctggtcgtgaacatcgccacgctggcgcggttgaatgtcctgcgggccatcgctccagcgctaacgctactgcccgtcagcgccgacgatatggcaaaacatctgcccatcaccgcgtatccggtgctgatcaccgacaaggggctggaacagtgaggctcgatttcatcctgcgcccggcggtggagctttacagcgccagcgcggccctgctggcggcagtatggtgcgtgatggctccgcaaacgctgctgctgacgccttattccggctggctgctggcgctggccttgctggcgctgtctgccctgcggctaaagcagggattacgcatcctgcgctttcgccgtcgcgtgcgtcatctgccgctctggacactctccgccagccgcatcccactactacccaacgccctgtttctcgggcgcggctttcgctggctgcccacgcatacccagcggctgtatctgtgtcgcctgccacagtgtgagcactggctgcggacggatcgcccttccgccagcggcggcgatccgttgttgcatggcgtggagctgcgcgaaggccgcgtcaccttaccactacgcgaccgaccggggcatacactggtgctcggcaccacccgcgtcggtaaaacccggctggcggagctgctgattgcccaggatattcgccgtggcgacatagtgattgtttttgatcccaagggtgacgccgacctgctgcggcgtgtctgggcggaggcgcaccgcgccgggcgggaaagcgtcttctggctgttccatctcggctggccggaaatatccgcccgctacaacgccgtcggacgctttggccgtatctcggaagtcgccagccgtattgccgggcagctttccaccgagggcaattctgccgccttccgcgagttcgcgtggcgcttcgtcaacatcatcacccgcgccctggtggcgctgggccagcgccctgactatgcccgtatcgcccgtcacgttatcaacatcgacgagctgtttatcgactacgcccgcgtctttctgcccggccacgaccgacaggcatgggacaacgtggtacggattgcaggtggcatcactgagaaaaacacaccgcgtaatctccagggacgggacagctacgttgtcgcgctggagcagtacctttccaccacccgactgcatgaccctatcctcgacggcctgcgttccgctgtacgctacgacaaaacctatttcgacaagatcgtcgcctcgctgctgccgctactggaaaaactgactaccgggaaaatcgcgcaactgctggccccggactacggcgacctcaacgacccgcgtccggtgttcgactggcagcaggccattcgccagcgggcgattgtctatgtcgggctggatgcgctatctgacgccgagattgccgccgccgtcggcaactcgatgtttgccgatctggtcagcgtcgccgggcatatctacaagcacggcgtgatggatggcctgccgcagacggaagaaaaagcggccatcaacctgcactgcgatgagttcagcgaactgatgggtgatgaatttattccgcttattaacaaaggcggtggcgcgggcgtgcaggtcacggcttacacccagacgctctccgatatcgaagcccgcatcggcgatcgcgccaaagcgggccaggtggtcggcaacttcaacagcctgatcatgatgcgggtacgggaaaccgccactgccgaactgctgaccagacaactgccgcaggtggatgtgctcagcaacagcgtcagttccggcgtcaccgacagccccgacgctcagggcaatatcgggttttccagcaacacccaggatcgggtgagcagcgtacaggtgccgctactggagcccgcctcgctggtccagctccccaaaggtcaggcgttcgctctgctggaaggcggccagctctggaaattacgtattccgttaccggacgcagcacacgatccgctgatgccagaaaacatcgcgcaaatctcccgttatatggaaaaacagtacgacagtgcgcccgtatggtggaaccgcccggagacagttgtgacggcgaaaaatgaccctattttatggctgaacgacagcgaaaccacggagaaacagaccgatgataccccggacacgccgccagctcgtgagcgttgaagtgatgtggcctgcgcaaacgctgcctcttcccctgcaacaggcggtggaagcactgacacagggagaaacgcccgaccagattattgcctggatgaatttacagggctttcaggcatggcgcgaacctgcatcaccgcagggcgaacacgacatttttcagatacgactggatgaggcgcacgaggctcgattcctctgccgctacgtcacgctgccgctgcactgatgcccgaccatgcgccaccaggcaccgtgcgtcgccccggactgctcggctggatagcattacttcccggcgtgctggctggcttttgcctcggcgcatggatgctggcgatagcgctggagtggttgggtgaggcgtttttctggcagaacacctgcgccagccacagtgaacaggtattgcaggcgacatggcactggtggcagggttccgctggcgcaccagtgtggttagtagaagacctcgtgagtgtcagcgatacgttgcagaaagggagcgcggcgttaattacctcgctcaacggtaaaagcggattgttctggacagaggctgtcgccaaggtgatccgctgcacattactgtctgcgggtaatgttaccctcacctttcttctgcggctggcgattctgttgcaggtgctgccgctgtttgcgctgattatcgtcgtcgggctgattgacggtctggtaagacgtgacttacggcgatttggcgcaggccatgagtccgggtttgtttatcatcacgccaggcgtatgatcggctctagcctggcgggaacgggattggtgtggttgacggtgccagtttttctggaaccaagatatattgtaatacctggggtgatgctgattggtttagcgggttcagtagcgacgggagcattcaaaaagcatttgtaatgcaatttagatcgtactaattcacccacccatgaaattcaagactgatattaccaaagcactgggcgttgataactgttttttttgtgaaaaatcggttaatttacacactggtcaaaagcatatgtttttgtagtaaaatcaacacaattttactcctaaaaagatataatacctgttcgtttttatctaataagttactcaaattattttcagtggagtggatattcattaaatgagcttacctgaggaaaaaatagctaaacgagcactgaaagccattgaatttatttgtcgacagctctcacgatttgcaaaaatgccccccgttgagcttatggcttacttacgaaagaatccaaaagatgccttttgtgatattccccatccaaaaggaaatggacatatccattgtggttttcttgcctggaacaagctgaatgagcttgcagatctcactatcgaattggatcacggtcttgggcgacgagtaggccgcagactcgcaaaggaagccgtaataaatgcttttgttaaaagagtattacaggaggcacgtggagttgatcaggaaaccgcaatgctgcttcttaaagacgctttaacgattttgagagaaaagcttgtagttatcgaacactacctaccgtgtgtgcttttccctggggatacacctactgaattcagcgttggccctgtcacattcatccgtcgctccaagttcttcgatgataaaaaatcagtactaaaacatagtattcatgttaacacgaaggcgcatattgagtgcgtagaggcagcgattgctcaaggtttcccacaagaacgcacgcacactaaagatgaatcaagacaactagtacgagaattacaatcccgagcagtcaaaacctacaaagactatccatggattgcttgtgtgaaagtgagtgattgtgatgaagcaatctctaaagaacgagcgatccaagctacagagatggcgcttcacatcatccgtatcctcttgggagctaaaccgacacggaaaattaggctagcatggtcacgaagcggagctctgcgctcggcacatttgcacgctgatgtacatggtgtgattcacgcaagtctctgcgctgattctttagaaccggttggtgtaataaactggcatgaagcattgataagggcagatttagaattagagatcctcggttctgctttgatacccatagtcaatccagtagaaactactcaccttcaccagcgccttattgacgctatcaattggtttggggacgcggttacagatccaaatgcacattcgagtatagtgaaatacgtttctgcaattgagcggttgttcttcggtaaattcgaagcagggcgtacaaaattgtttgctggtcgggttagggatgtgttgaaagcattcagttgtgatgaagggcatcgtgtttattctcaagctctagaactatacaaaactcgttcgactttggtacatggagaacaatttcgcactgaagatgaatcctttaacattattaatcttgcatcagagttaagtaggatgtgccttctatgctctgcacagctttactccatgatgctacaagcattcgaaaatcctgatagtgcaaaattagaagaaatcatgaagcgcatcaatgatgaagggttgaattggctggcagaggctgcagcattaggcagtgcaaaaaactccccactcagctaaaccatgaactttatcagaagcgggcgttcaaaagcatatttgatcgccctatcatcgataaatcattcagatgaatcattatattgggtctgtagtatcttattcagtaaattacattcttcaggccgaggtatcattttcccaaaagcaataaagaacaggaacataactacagcaactgaatataaaatcaaatgtccccaaacagggatttgttcatgcctgtaaatagataatattagtgataaggcagcgatcaacagaaaatgaagcgagaaaaaagcatacataccgttctcgaaccagaaagaaaatcctttcttgaacacaagaactccatctttaatcagcaaaaacgttctaaatttcttgaagaaaccgacagatattgaatctctattttctacaaatagacgcagaataattttttgactagcgacatcagaaattccggtcatgcgatagctagttattctcttgatatcctctttgatgcagatactaacctcatccgatagctcgtggctatccagaagacgctgcaactcatttaatttagagttcctgacctcattaacaaatgcgataatccctcgtattttccagataacaagagccatcggccccgcaataaaaataaagagaagaacctgcttcatctgcaatgctccgcttgacacagctgcagtgatccatccattcacgatatccaatattttacccataacctattaccaaaaaaattaaatcgtatatgaggataaaacatcacaacataaacttggtaatcgtattttcaatttctggctgaaatcttcttgcagatcgttgcatggtactcaataaaccagaactgaagaaaagccgcttatgcaagccatcacgacatttatcgccagcctgtttataaccagttccgctctcgccgcccccctctccgagcgcgaagagctaatcctgtccctcaaccaacttactcaaatcgaagcctcgctcagccgcgcccagcaaagcgccagaactggcctcaacgaacgctactacttcgattatccgcgtatccacagcgatatagccgccctgcgtagcgggattgaacattacctcacccccgctcgcgctcagccgcgagatacggcgacactagtcggacaataccgtgaggagaaaaccacgccatgacccccgaacaaatcagcgccttccaggctgccagtctggtgaaacccgatgccgtcaacctggtgatgctcggcctgttcagcgcctttctgctgctgtgggtggtctgggtactgaatgacgcctaccggggcgtggcgaccgcgcgggtaagctggcgggcgctgggcagcatcggcgggcgcaccatcttactgctgctggtcagcttctggctggtactgagctagcggatttcaggaggcattatgaaaaaatggctattcagactgctgctgtggttcccggccctgcctgtgtatgcagatctaccagagatggaagatccctctcgcggtcagggcgacggcatcatggaaacgttgcagaactacggctatgacattgtgatcctgatgacgctgggcatctgcgcagtgggctttgggtgtagtgagctggaggcggcgatgagggtggcaagtgccaatagaacataaataatttattccacagttcgttgcaacaatcattttattgaaaagattaaccatcttcctaaaaccactctcaactattatctatttgaaataattatacttaccacgtaagaactaagatgtacctcaaagattaaatcaaaaaattcaataaaaaaatcaattgattgcatatgttctatagaaaattatttatcatagctcagcgtcatttcaaaaatattctactcttaaaaagatgttacacacatggcatgcatcgtaataaggtgaaaaaaaatggtaactaaagccaagaatcttgatgattttatgaatgagcaaagcattagtgcatcgtattatgttgtatctccaagtaacgtattatctgaggtttttgtatacccatatagtactaacataggacttatgagtgagctcaaaattagtatccctaaagacgctatttcagcagttactccattgggaataactacagaaattgacttaaaacattatcaagttgttacaataaaattcacgggtgataatgggattatctatgaaaacatttttgaagatttgattaacaatgccacacaaaaaaaacagattgatctcaaaaccaagaatgtatctctagggctacaagacgaatataaaccaatgcgcgattggtgcgggtggcattggccgactagataattagattttatatattacagtgatggaagtacattataccctttcatcactttttataaaaggtgatgtaacaatgaatagtaattatagtttcataaaaccaaaattcaaaaatgatattgctatattaaatgcagatattgcctctttaaaatttgctttagatctaaataatagagatgatattgtatcagattttttgaaatttcatcattccgcaacaaaaaacataagaaattcaaaaattaatttattagattcaattcctcatgaaaaattcaaaatgatcatatacaaatggggaatgttatatgaaaaatattataagtttctacaaaaaaaacatccacctaatgagctacagcattttcaccccgagttaaaacttagtatctctggtattgcagcaatatctattgcttcacgttactctgaattctgggctgaatcatccgtgagaaatataaatatttataatcaatgggaggaaagattagattttattggaagtgattatttttataacctccatagacttcgtgaaaatggagattttttagcatatgaccgcagaaaactatccctccctgtttttgatttacataaagaattaacatttcataaagaacacagcatatgggatatttttaaatctaacaattggcatcttgttagattaagcaataacgctatagattttataaacaacaattataataaacggataactaattttggagaaataaaagccatcgctcattgcttgcagcgttctaaaaatatttttggtataaacttcactacaaaatcatatggaagcattgggcttggttatgcaatcaagaggttctcttccatgacatattttctggactccatggaatatataaatagtttcaatataatgcaacatctaaggcatgcttcagaattttgctcaatcgtatttcataaagacaatagagatgaggcattttccatattcccaaatcaatcaccagtagatgtcacaaatgatatttcattagaagtaattatagagatatccaaaatagatggtatcatcagaaataaaaatgattacctctgcttagatgaatggtatttcaatggcaacgattattcatacagaaaatcgagaccaaaccaaccttaaaaataaaaaatcacaaccaatcactcgccaaataatttcattttcgcattggtcttataaattaagatagccaattacttataaaaatatcatatattctattaattgccacctaatcactccaacggtatttcccacctcagcagcctttcaatcgctggctccaccaataataattgacgggccagccgtaagcgttccatgaccagttccttttgctttactccaagcatagatacatccaatgctgcttcatggaaaagctactctataagcttatcttctgcccactgcatcataatcgctttcagctcggccaagctggcgttatatgcgtctttttcccttctgatcagctccttttcccgatatctcttttcatccaactcccactggatccgccgtgcttcagcttttactctcgcctcttcccgctgctttttaatcaatggaactgcatcacgtatcgcagaaatgattttcaggatctgacttataagtccgcccccaaactggccatgatagatttccccggctttcctatatatctacgtagctcccgtcaataactcttgcctgtagagattgggaaaatattcttgccaactgcccggaaccaattgctggctaatctgttcaaaggtcatttgagtgacttccttcattgagaagtattcgagtagtgaaaggcgggtaatgattggttaaaagataaatgtttgggataaatcaacatcatatgccccttcccatcctgatacttatgcccatatgcaaacatctgataaagatcagattgggcaatgttatattttttatctgtttgccaagaagtctgctcaatgagtttccatttcgtatccagagtctgagcgccattcgaacctctcagtaaaagatctggtttaagcaggaacatagcttgtggcttatcactattgcctaccgtatgctcaagcaaatattgagagctggcttgtgatagaagttggcatcctctgcgtatgcgtgacctaagtgagacctcaacatatttttcaaataactgttccatcgggaaaaggagcgatatacctttatgactgccttgctgaaaattcgggttcattttctcaagaattaactcacaccaagggcgtacatcattgtagatctgcatcagcttgctattgttccaaaaacgcagttcgcgttgcggctttgcctgtaaagggatttcagccatacgatgtgagagctcattcgccaatcgccaattttcactgttctggcaagttgccaacacataattgagtgcggttttcaacaggcgattttccagacggtttggtgaataaatgtcatgactgatatggaaaagatgttgacgtgccggagattgcctttgctgacgctggatttttagttgtccacgtatgaagcggctttcttcatctacacggcgataatcaaaacacaaccctctggtgactaagacctgcaactcagataggaactgtcgaaaaatccattcatgtaaaggaacattcatccgcattagttccgcaggcccagcgacccgtggccgaatatttaaagcagccaggagcatgcgctgtaagatcttccttgtttgctgagggttatcctgcccaaagtttgtcttgggtaaaatttcaatcccttctccatccggactttgcaagtatccgatatagctacctaatttaaatacgtgatagccatcagacaatagcaatggttcctcacctttccattctgaggccagtttcagcacccattctaacgtctcacgttttactactgcacaatccaaagatggtgttgcgcgttcatctgtggtcagccgggcgtactcacgcacttgaatcatcagttgacagccccctcattgggcaaaatcccttggtaagcggctgcatttgagaaagcactttgattaatccggtatctgcgatcatttaattggctcgcaatagactcggggaataagcttttaattccatgttctataatatctgtctggataaatctgttttcaggtgctttttcgctatcattgagtacccaaccgatacgttcccagtctgcaaaaaaatactcttgcagtagcggaatgatacgtttcgcaaaaatatcagctatcagtttgcacttttcatcctcagttgtggcagtcttcagcggccagaagtatgcgtgccccagggtatgatcacgatcgagtaagacttcgatgcgttgattcattactgtcagcagatcaccgatattaacgccaaatactgagaggtcggacagtaaagctggctgcggcatgatttctacaaactcaaagcgacgacgtaatgccagatcaagttgagccaatgatttatctgccgtgttcatagtaccaatgacatacaggttgtcaggaacagagaacaattctttagaataaggcagaataactgagcgctcatcatagccgcccaatcgcttatccggttccagcaatgtaatcaactccccaaaaatacgggaaatattcccgcgattaacttcatcaataatcaaaatataattctggcgttctctgatgttgctggccttatgaaatgaggctggcaggggaatatgttgtttatctaattcagcaatcaaagcatgccaactgattcgataaagtggatacaatgtctgctgaaccatttttgtactaccattaagcgcaaggatattcagttcaatatcctttaatacccaattaaccttgcgcatatgcgcgtactcacccgaagtagcggcgtcttcatcaaatgaatagtctgaagtaacaattccaactgcctgaacagtttccgcatttttcaagcacagtagaacatccccaacctttacatcatttgaaaaggcgttaagagcattgtggttaggatgactcaaggagttccagtaatcctgttgttcctgtgtcttctgttcaaaggtctgagacaaatcccccgtgtcattccaaccaatacgagcttcacctgcattgatatagcgatcacgcatttctttttcatgggcacgaccaatagagattttccagatatcaggagcttgagagagtcctatctctttagctgcaactgccttagcagcacggtcagcaatatctttgaaaataccgttctctatcttgtattttatgccctgattttcctcagctacctcagcacggatcccctcaatgaaatcctcatacgaaaaactctgatggaaagtggtaaacacgatgcgtttatctgcacataacatatcgtatttatttttgaccgcttgccgatattcctcagtactaagattctgactttccagatcgctataccatgaaggttctgccaacaaaactgcacgttccagcgttgaataggttttaccagtaccaggggggccaaaaagaatctgattcagtgatgtgtgagtttttactgatttctctttattttccatggcaggtaggtccttcgctgggtggggtgcataccaatcacacagtgtaattaattgctcaagcgtactaatctcaacagcccatgctgcattcccctgagcaagggttggagcgtgtgttgcgaggtggtggttgcggctcttgccgctctcataggcaataacttgggaaagaactggatcggtaggctgctcatcaacaaagattttaatcttcttctttttctccggagccttacctggatcaaatgccaactccctcattgcattcgttttatacgcaatcagatgtatggttgacgaccgactctcagggaagcgattacttaagtattcgtctgcaattaccgaggtgaacgaaccactctgattttcataccaagcttcatacgatatttcataatatgattttgactgtgtactatcgagccatgacaacaactcttggtaggattgccagttctctttaggtaattcacgcccttttttcttgagccagtgcttcgtttgggcatctacagggaaatattcttccggtgataaataaaacaaacactcagtaagttttgcgaaaccggtatgaggaatttttagaattttatcgaacaattcaccatcaattttccctgcacgcatctgatgaaacagtgcccaaaggctgggcaccatatcatcagaacgttctttttcataaggaaagagccagactttgagtggctgtgcatttggaacgccgttgaaatcactgggtgcggaaattggtaaatttgctcttttaagcagagcagcaaagaactcagtacgtttgaccacgccatacttcataaaagtagcaaaaaaagtgaacgggtctatcactttcagcgactctctacttccatcagaaagttcgtcctccagacctttatcaacgcctatttcacgtagaatttggaccaattcttgctgtttattctcgtagtcagcaatccatctacaaacgtttttgaatacagggacccaactatacttagacaccgacgctctcctaggtgaaaacgatccatttggcggtttgatactaccgcatcgtagttgtttatttaccagacattcttcgcaacagctgttgctctttcccatgccagtgtaagtaatgggactttcttgataccttcctagttggtagaccaactaatgctaaatcatttaagatcaattagttatttaaatacacatcgaggctccattgtcaaatatctgccaaagcggtggggaaaattcatcagatgttaatgcctaaaacctcggcagataacataacccatgttttagtctacaaagtcctccgaaggcccatgggtgctactcatagcattgttgtcgctgtcccaaaagaacaggtcggcccctcattgctcaacacaccagtatgtaaacaatgcaatacgaacttccattatcccttgctaagtatctcctgtggcgtttgccacttcagtaatcgctcaatagccgtatccaccgacaagaactgacgagccaaactcaaacgttctgttgcctgacccttctgcttttcttcaagcatagatacatccgcttctgcttcacgaaaaaactgctctatacgcttatcttctgcccactgcaccataatagatttcagttcggccaaactggcgttatatgcctctttttcccttctgattcgctcctgttcccgatatctcttctcatccagttcccactggatacgccggacttcagctttgactctcgcctcttcctgctgtttcttaatcaacggaacagcatcacgcatcgcggaaatgattttcgggatctggcttataagcccgcactgttttgtctggcgaaactcaacctgccagttagttgacgagtatggcgagtagagctgtagaaagaatcgtccggtaggtaaggcatgtttaatgacatagcgaaatggcttgttatattttcccctcatccagcggatcatcgtttcatcgcggatgtatcgaccatcaacctcttctgctggaacatattccgtcatttcagctaggttaaaggcgaacagcatatccccaacgcagataatactggctgaacaagggcgccataagctgtcatagcgcaaaccgccctcttttgggtcttctttgatatctatgcccttacaatgaagtccttcatttccttcattcccccttccgcaacccggcgtaacaccttcccgctgacggcaggcataagctggaacagcgatatgatgtgcggcaatttcgatatcgataccacagtgcgcaaccagctcaacggggtgacggacggcttccagcaactaatgggtgaggttatcgaaagcgctaccagtgcggtcgccagcctgcccgcgatggtgatccagcgtgccaatccccagctctacgatctgctgaccaacggcgtgcttcagggacggctcgacttcgataaatcactgttaagctgccagaagatggcaggcaaaatgaccgattatgcgctcggtccggcatggacgcagagcgcccaggcggagaactatcagggaattgcggccagtgaaaaagacgcggttcgcgccgaccagagagctgccgaagaagcagcagagaaaggcaaacgctgggtgggcggcgaacatcgcggcggtaaaggtcaatcgcccatcaaactggttcgcgatacgacggtcgcaggctacaacatcctcaataatcgcaacgcgaccagcaccagttcggtatccagcaacgactgtcagggggagctgtgtcaggtatggagcaaacccgacgacgcagcgcaatggctgactcgggtggttggcgagcagaccattaacgtcgccccggataacgatcaatccggcgacactgaccagcaaagcggtgcacaatctggcgtcgggctgacgccgctgattcaggaagagcaggataagatccagccgctaattatcgatatggtgaaccgcagccagcccattaacgatgacacgctggcgcaggccagcggtggagagctgcatctgacacgcggcgtgattgaagcgttgcgcgacgatcccgatgcagcggtgcttatccagcgcctctccggcgaactggcgctctcccgcgtgatggagcaggcgctgatggcccggcgcacgctactggccggaatgcgcgagcccaatgtctccggagaaaaagaggcacaaaccgcgctgacccagaccaccgcccagctcgaccaggaactgtctcagctcaagctggagctggatatgcgtcaggcgctggcggataacgcggcgctcaccatccttgaacgccagaccatgcgggcgaagaccaaaggccaggcggtcggcgtagaggacgacaccgataaacgggtggacgatctcagcaagcccactggcggggatacgcaatgaagcggctgatgctctccagcaccctgctgctaacctgcatggcaatgatgttttatctatcatcaggtaacgcgctgcagattaaccgcagcgatctgctgctctggcgtataacgctgtacgctgcaatgtccggtgtgggctggcgtctgtacgatcgcttccctccgtatcgcccgaccatcctccgcatcgcgctgtggtttatcgtactgattgtgctcaacgaaatcgtgccggaggtgttccggtgacgaccaacagctacctggaatactttctgacgctgctcggctgggtggtcaataacgggctgtggaatacgattagcgccaccgggttattcgccctgccgctgctgattaagttgctggcgttgtggttacaggccagaagtcagggggcggatgaaggcaacaaagccgcgctgtctctgatctggaccgagcacctgatgtacacctcgctgctggtgattatgttcacctgcgtaccgatgttgaacatcgacctcgataccatcaaatatgacaccacgcgctcaaagcagtgcggaatgtcggtaccacaacccgccgataccggctatcagccgattattaactcactgggcggcaaaaccgccgccgtcccggtctggtggtactttattcatgtgatcagcaaaggcatcaccagcgcaaccattgccaccctgccctgccaacccgatctacgtcagatccgttttgaggtgcagcacacccgaatcaaggatccagcactggctcaggaactacgggattttgtcgaggagtgttatgccccttcccgcgcccgtctgaaatttcgtgccggagagctggacgatgacaccagtgacaatactgcctggctgggatcatcgtactttctcaacacggctggttactacgataccgaccatgcgctttcaccgcacagtgcgtggccatacagcacatcacgcgatgccgggctggccgatacaggtgcaggcggttatcccacctgtaaacagtggtgggccgacgatacggttgggctgaaggcccggcttcttcaactcccggctccggatatctggacagcgtttaaaaagatcggccaaccgcaagcggtgtatgaagaggccgtactgcgctcactggtcagcgaacgcaatatgcaggtatcgcaggatggacgcgtttaccccggctacggcggcaatgtcgatggtacgctcaccaacgccgccacgaggttagcctccactgctgggaacatcataggtagtgcagtggccttcccggcgtttgacagcgtgcgtcaggctctgccaatggtacaggcgttgctgcaaatggcactggtgatttgtattccgctgataacgttgtgttcggcgtgggacgtgaaggcggtgatgacgctgacgtttgtgcagttcgcgatgttttttctaacattctggtgggagctggcgcggtggctagatagctggctgctgggcgtgctttacagcagtgatactcacagtagctggaatctggccgggatccagaactcgcaggatgatgtgattatcaatctggtgatggggtcgatgtttctggtgctgccaacgttctggctgggggcgatgacgtgggctggagtgagggttggcgtggcggtgaatggggcgctgacgggtggggttaaagtggcgcaggatagtggggggaaggctgggggatgattgggaggtgacacagttaaccacacgttatggtgggaaatagaaccatacaatacagcaaacctctggcaaaaaatgggtaatttcgatagaatatcgcttcttttttgtcccaaacgagcctttccaaggttagttccgccagggatgttaattgagtcgttttaagccataaatatggctctgactcaaccgaaaactcttcatcctcatgtattgtaggaattaaatggaagcatgcacatgacccttagatacattggctcaaaatctagactaataaatcaaatcactaatcacatagggtcacctaaagatgacgctttctttgttgatgccttctgtggaactggtgtcgtagcagaagctgctgcgagcttgggctggaatgtaagaatcaatgataatcttctatcagcagtgatatccgcaagcgctcgtcttaccacccaaaaacaagcatctttcaaaaagcttggtggttatgagaatgccatagctaagcttaatgcggctccccccaaacaaggcttcatctggcgtgagtacagccccgcatcctatgatctctgcggtattgaaagacggtattttacgcaagaaaatgccgcaaaaatcgatgccatgagatggcttattactgactggagcaaatcaaactcaatcaatgaaatggaagaacgcctattgattgcagatttatttagtgctcttaatcgggttgccaatattgcaggcaccttcggttgcttcctatcaaagtggacaaatcaatcacaagatacgttgcaccttcgttgccgtgagcttaagaatcatagtgttctggtcgagactactataggtgacgtcttcaaggtgccgaatacggaatcagatttggtataccttgatccgccatataccaaacgtcagtatgctagttattatcatattcttgaaacggtggcatggggagatgaacctgatgtggtcggcgtttcaggcttaagaccgtggaaagatagagcatcggatttttgttacaagaatagggcacttaaaacactttcgctcttagtgcaaagtttaagatctaaaaaagtgctcctttcatatagcagtgaagggcacatttccatgcaggatatgaagctcgagctttctaaattaggtaaattcacgatgcatcctcttggagcaatcggacgctatcgacctaacaaaactgccagtaaaatgggggctgaagtaaacgaatttttggtcgaagttgaacataccgccacgagccgattgtgtgacgtacaaagtaacaatgctcaatttactccaattcatcttgtagataactataaatgagcgcacccaagacagttgagacacagtatctagcttcagcagaagctgccctgagcaaggccattagccgtagtcatttctcaaattgttttgagttacggctccaggttttggaagctgcttcttcaatatttggcggatttgatttggctgcttttcacttggctttcggtataaaaagtgtaataccttcggaggagctcttagagctttcagctcccgtcgtaaaagccatagaaaaagcgcctatctatccagcattagcattaagtattttatctcgtgaaactttagatgagcaggatcgaaaaagcacaggggcttaccacacagattttagattagccatgcgactggcagagcttgcttcacctaacttgacctataaaagcaaggcgattgatcctgcctgtggcgctggaattttgctatcagcattaacccaggccgtatgcgggggcgataaagccaaagctgcctattggttggaaaacggtgtgtgcgcagcagacctctccgctaattcgttgcgtgcaactctattgagtcttgcttcatttacagacagtatatcggtccttaaaactatgcgctcccgctggtactgcggcgacagcttaatggctgatcatcaagtttggtcagatatgtcttctaacggatttgacgcagtcattggcaatccaccatgggaaaaaatcaaactatcccgacatgaatttctgaaatcttctggcacaaaacgtcactatgggtctctcataaaagagctcgatgaagaacgttttgctaaacaacgccatgagattgctaattactctcaacttcttcttaatcgctacccaaacttaggttgtggtgaaccagatctctatattgcatttacagacctcttctttgagctttgcaaaacacaaggggttgtggcagctcttttacctgggggacttattcgttctcaaggtacacaggcaattcgacagaagattattaatgcaagtaaccgagttaccttatcgattatcgataaccgcgcccgctttttctctattgattcacgctttaaattcttggctgtctgtctggttaaagcaggattaaataaaagtaagcgtcaagacatcactctcttgcacgaacaaggaacaccaactggcctagaaattactggaactgccactattaaccataattcattagcctctgtacgtcccgatttgagtctgccagaagtccgcagcgagagcgaatggggattatttttaaaaatcgctgaaagaggaatatcatgggaagagcctggctacggctggacacccaaattctgccgagaggttgacatgaccaaagaacgttccaagttcctaggccacgcagcaatgggaacaattcctttggttgaaggacgtatggtgcaggcacaccgtttcggtgtaaagggacatgtatccggtactggtcgcagcgctctgtggaaaacttatgccgttggttgctcgcatctttcaccgcagttttggattcgcccaacagacattccccgtgccaatcagcaccgagtaaatatgttacgtgctggtttttgcgacattgcgggtcaaacgaatgaacgttctcttatggctgcattgattccagccggagtggtttgcggcaataaggttcccacgatcctttttccggaggatccatcagaagagcgcttactagtgtggttatccattgtaaatagcttcgcgtttgattggatgcttcgccgtgtgctcaccacaacagtgaattacttccttctgcaaagcgtgcctatacctagactcaccaaggatgatttatcgtggaaaaagctagcgaatgccgctcgtgaattgaatatattagataactcaggggctactcgtgcaactcacgagcgtatggcgcagcttcgtgcacaaattgataccgaagtggctttagcctatgggctcggcttgaaagacatggaattgatacttcaagattttccgcttttagatcgaggtcaaataagacttcacggtgaaagtagatctacgatcacacgagacacagttttatctgtaatggcaagccgtacaggaaacaatcctaaagtttggtcatccagagtcgcggaggctcataccttaggagctgtagcgtatataccctcagaagttgctcttggtggggaattaataaaacaagaaggagtccgatatcatggctaatggcgcagggcaagttgcccggatattatataaagaaattgtaccaggtgaccttaggaaaattcatgcagaatctaacgacgctaacacgggtggtggagctcgtgactttcgctttggttcttaccccaatatagcatcgattgttaaaaaaatgttcccaaaccaagtgattgaaacccgacgccgtaaaggggcaatggttcccactactatttactcaggctatttctattggaacgacgccgctgggaatatttatagagaagtttcctattttgaacccccaacagatgctcggccagcagaaggaagaatagccagagttcatgagcagccatgtctttcgactactctgatgccgactccggcccccggaaacaaagtttttctgctcctaattcaactattggactccaccgtctggccatattatgcagaagaacgaactttacgtactgcaggattatgggacccccaagtagcgcaaagaatgctgaattgtattgatgcaccacgccgggtagatcaagcggttattggtttttttgattttatgaatggtggaatatattgcaatggccgctagtttttctactgattgcttacgtgttttaaaccttcttgctcgttcaaagaatgttttgctcacaggagctccggggacaggtaagtcaaaactgttagctgaggttgctgcagcatttgagtcagcatttggtattacacctatgggtggaacgccaatgcttaaccctattaaaggtataccaattccaccttcggttgggatggtaaaaaaaatccccgcacctaacaagcagaaacgtaaggtttttaggacggtctttcatcagaactctaaatatcgtgatttcatctcgggcatcactcctgctgttaataaggcagcaggcgctccagattttgccattgtgaaaggcacactatatcgtgccagtgaacacgccaagcaagtcaatggggcagccctactgattattgatgaaattaacaggggtccagctgtacaggtgttcggtggcgctattgtagcccttgaatcagacaaacgtttatcagttgacggggtgcctcgtgcggaaacacaattctttgaaatactcgatcccatctctggcaatgtcatcgaatatgctttaccacatgatctctacattttagcggcaatgaaccaagctgatgcttctgtagagcctttggacgtggcattcttacgtcgctgggaacctttacgacttgagccagacgaaagtattttaagagcttattatggtcttggaactaagaatatcgatgccttacctgatttaccaggaagtaagactgatgtcttggaggcatctgtcagagcatgggtagctataaatgaacaaatatcccttggacgtggccctgaatttcaaattggacatggagttttaatgtctgatatagaacttcaggggttagctctacccgagattcttggcacgctgtgtgttggatgggccaaagtgcgtgctcacgtagaggaggtgttctttggggatccccgaggtattgctgcagtccttaatgctctagatgggcctagttttaatcctcttaaactcacagaaacgacatttgccgatgatttacggttcagacttgagggccctgcgaattttacagagagtaatatctacgcagccctacgaagttttgctaatcctagaggctaatcaattgtgactaatatcaaaacccggctatctctcgttgagtatggttcacctgttgacttaggtcgttttattgctaataccactggcatagatcgccccaaggcaaacagtatcttaattgaggcgggaaaccgtgtggcttcaaacttaaagcttaactacaatcctattgtagttgatactaaaggtataagagctattgattttgcaggcctcatccgcattaccccatcattagaattagaagtcgcacccaaattccttgggctcaatgatgcttactctgcttggcgtgaagattttttcttcttgtccactctttcacggcatggacgtcttttagtttcggagcaattatcagcttccggaagctcgtcacgagatctaccaacattgatagctcgcgcaatcataaatatgtatgaggcgcataagcgtagacctttgcgcagttaccgccgggtgcgtgaaaaagagttttttattgacggagaccctgaccctatggagttactctttccatcagccgatggttttgaacaggagtttattcgctttgatcagcgaaacagttggaacgctaaccttgtagctgcggccaaagcattgctaccagaagttaataatccctctgttgtgaatgcacttatgcgcctaattggtaatttgtcaccgcaaaatttacctagtcgtagtaaaccaatccccgccagacacagggcatggaggccattacatgaactgtctatggatgtgctaggagggcttggactaagttataagcaggggcaggcacgcgcaccaggttacatagtaggaacttggcgagtttgggaggacttgttaaccatagcagccaggcttggttttggaagcgcggcagtagttccacaaagtggctacacccttggtaacaaaactaaaataacaacaggaacaatcagttcactatctgtatatcctgatctttcaattgaatccgatggtattaggccaaagatactcctagatgctaaatataaagggcatatagagaaaggtgcgcttcatattagtcatgccgatatttatgaggctctagctttttccaaagcagcaggtagtaaccatgtaatactggcatatccttcgatgccaaatggtaatattcagcctgttggactatgtaacatttttgaaaaaatagtcatcgataaagtgaacatcgtaggtattcaggttgaaattcgtggtatttcaagacccggagcgattcaaacattatcccgtaatctagtaaaaataacaacctctattataaaattataaaattatatgcaattgcattcccaattaatatcgaggggaagtgttaggaatttcaagccatgccaataagatataatcgaaaaggaataatacatattccctttcgatttaaacaacacgctaaaaggacatccttgtaagtatcccaactttagttccagatattttttgagatcccggccaaacgattgtgttgccgatattcctccggcgtcatattgttcagtgattcatgagggcattcacagttatattctgacacccatctttccgtgatttcccgcacttcattcagcgttctgaacagataaaaatcgagtatttctgtacggtatgttcggttaaagcgctcaataaaagcgttctgcgtcggcttacccggctgaataaattccagttttactgcatgttgctctgcccattcagctagtgcaagtgagataaattccggaccattatccatgcgtagcatgacggatagccgcgatttgccgcgatcctgtcgagtacacggaccacgcgaaaagctggcagattcagatcgatttcaatcgacaatgcctcacggttaaagtcatcaacgacattgaacgtgcgaaaacgacggccacagaccagagcatcatgcataaaatcgacagaccagctctggttcagcgcttccggtgtggccagtggcgagagattacgcaccggcaaccgttgtttgcctttacggcgaaaattcagtttcagcaggcagtaaatccggtgaacacgtttatggttccaagtattgccctgcctgcgcagcagctggaacagcttcttaaaaccgtagcgcggatagcgttctgccagctcagtcagcgcatggatcacctgttcataacgccgggtatcaggctgataaaaatacaccgtcctgctcagcgataacgtcctgcaggcctggcttaaacccatggcaaattgcaccgtcagatagcggacgagttcacgctttatcgctggttttaaagcttttttcgatgacatccttcagcgctctgcattccaggctgagatcggcaaacatctgcttgaggcgacgactttcatcctcaagctccttcatctttttgatatcagaagcttccatcctgccgtattttgccttccagttgtagtatctggcttcagatatggcagcctctcgacacacatctttgacagtgcgtccggcttcgacggacttcagaacggcgataatctggtgctaagtgaatcgggctttacgcatggcgatctcctcaggggacataatcagtatgtcggaagatctctaaaagtgaatgggcctttttgccaggatgcttacaccattacgaaacatgaaaatgacttaaccaaggttaaaactcacgctgatagcacttgaaaaaaataatacaaataaaacaatatgttgattaaaaccctcgttatgttcactcttgagagaactgaatatccttgggttacctatgaaagttaccaacgttaagcatctttccctcacttaacaacatgacaaaccaaaattgaatttcaccgcttttgcgagcatgatcgcaatgacatcagcctgttacccggttcattcctatgacatcactcgaaacactgcaatcggctatctctaacgtctctgtatggcgtcagggtgatgtatgcgctccgcataagccgttgttgctgttgtatgtgctgtcgcagtataaagcaggccacccgcgcctgttcaactacgctctggagatccacgaaccacttactcgtctactaaaagagtttggccccaagcgtcgcactgactatcccaatatgcctttctggcggctcagaactgacggcttttgggaaattgccaatgcagaaggttgtaaaccccgtaaaggcaacacccaaccgaccaagaaagagctgattgataaccaggtagcgggcggttttgatgaagccgcttaccaacagttacttgcacaccctgaagtaatcgaccaactggcccaccaggtcctgatcgatcgtttccccgagagtattcagcggatcctagccaaccaactgggtctggattttatcgaccgttcaaagaaccgcgatcctcgcttcagggatatcgtgctccgggcttatcactcccgatgcgctttctgcggttacgatctacgcctggatggtgcgctagttggtattgaagcagcccatatccactggaaaacctatggtgggccgtgtgtggttaacaacggtctggcgctgtgttctctgcaccatgatgcttttgatatgggcgcgttcgggctggatgaaaacctgacgatccgtatctccggcggcgtcagccgtagccctgtggtggacaacctgttctggcaacgaaacggccagtcgttgcatcttccttatgacaaatcgctatggcctaccgaacaatacgtcggctggcatcgtaagcagatcttcaaagcctgagaccatgagtttcgcaggtatcatcgattgcccaattataccctccaaaggataaattgcctttaacccctctagcggatacatcctgcgcaccaaaatggagccagaataacgactcccaaactcacacttagcagcctgactcttgattattattgataccgtattaatctgtacgaagttcaacccgcaaccagagccttcaggttgccactttcccggtgaggctcgccttttcgtccgctccgtatcatcctcgcggacagcgcttagcgcctgatacatcctctaccccaccatgcagggaattcctccctgtcgggcggtgtttctctgctttcatcactggagaaatactatgccaacttcatccatcactgaagcaacatccttatcattgtctatctcatctgaggcctgggaaaaggtagtcagttttccacccgatccctctcaggaagatgaccgcctcgaaaacctgattgtcgcgaccatactgacattcaaaagcgcaggaccggaccgtaagagcattaatttcggtctgtactgttttcccgccgacggcagcagcaatgtaccgctgatgacgccgctgcgcttaacccttgaagatgaccacctgttggttactgcccttcacaccagctgattacctcagcatcctttactccccgtgccgggcgactcccgaccgggagcgctgtacccggcttctttatcatgaggttacgcttatgaacagaagcaacgatctttaccagaaagtcaccgatgaaattatcgccgcgctggagaaaggcgtgatcccctgggttcgcccatggcgggaaggggaaccggtggtgccgatgaatgccctgtccgggcggttttatcacggcatcaatattcctctgctctggaacagcgcagaacgacagggatatgaaagcgatcgctggctgaccttcactcaaattcgcaatgcgggcggtaacatccgcaaaggcgaaaaatctacactggccgtgttttatctgccccagcagcgcgaggtagtagacagcaacgggaacacggttcttgatgctgacggcaaccctaaattgacgtcctacgcagtggtacgcgagttccggctgttcaacattcagcaatgcgaagatctgccggaggcgttttcacaacctgtcgtgatggtcgatgaccctatcgccgctgccgagcagattgcccgacaaagctcggtagtgatcactcaccgacgccagaatcgggcgtattactcaccaggacgcgactgcatcatcatgccgcatcctgagcagttcacttcgcgtgaggattattacggcacgctgctgcatgaactgacgcacgctaccggacacgcttcacggctgaaccgggacggcatcactgccggaaagcataccttcggagatccggcgtacagttttgaagaactcgtagctgaaatgggagctgctttcctgtgtgctcatgttggtatccagtcaaagctacagcatgacagttacatcgcatcgtggctgaaggtgttgcagcaggacaaaaaagcgattttccgcgccagcgggttagcgcgtaatgcctgcgagtacctgcttgaacgagcgcagcagccgttagcgctgagcgcataactaaatcttgccgacagtatggttattctatctgtcggcattctactggctgttaaatgctaacatctcaaccccgttttattgataacgatagcgaggccttcagtgagaacacgcccttcatcacgattactgattattgatactttaaaccggatactgcttttccggttcactcacaattctgacgcactggctggcagatcttactgggccacacccggaggtggcgtcgaagatggtgaatcctttgaacaagcagcgataagagaacttcgtgaggaaaccggaattatacgccaggatatcggcacttctgttgcagagcgtacatttcagatgctgttacccagcggcgaaacagttctggctcaggaacgcttttttattgtgcatattaacgatgaagagatcagcaccgaagcctggagcgatcatgaacggctcgttatcaatgactatcactggtggacgcctgacgagctggaaaaaacaactgacgttatttttcctgaaaatatatccgcgatcctctccgagtctgaaaagacccgccgctaactgatatccaccaaccaggtacctaaactacacacaaaataaatttgcgcgacccaataaacaattttcccccaaatctgacggcaccaaaaggcaaaatccaaagggtgaaggggaagagagtgaagggggaacgggcttacccgaaaaagggtctccccttcgtctttcgagttgcaggtgcgttggctttcctcgctcaccccagtcacttacttatgtaagctcctggggattcactgcgtcgccgccttcctgcacctcaaaatccattgggaataaagggccattatgcggatatggctgacgcgcaaaaaaccagaaatcacaccatccgacggcaagccgagcgccacggagggatggatgcatcctgaatccgcgcaaacactactggctgaaactcctcgtcaacagctggtccagtttattcgccagagcaccgcccttcccgcctcactgtttgaacgcttctggctgataccaatccacagcttcgcagaactggcgcagttgttcccagcctcggaaaaccaccaccattcccacgcaggtggcctgctcgatcacagtctcgaagccgcctgttatgccgcacggctgcggcagagttatcttttcccgcctgatgccgcaccggaagatcaggcggcgcagtccgaacgctggaccaccgttatcatctacgccgcgttgctgcacgatttgggcaaacttatcaccgatattgaggtggaagaaatcagcgggaaacgctggtttccgtggcatggcccactgacccagtcttatcggtttcgctatctgccgcaacgtgattatctgcgccatccggctgcggcagcccttctgcttacccaacttctccccccggaaagcctcgactggctcgccgccgatgccgctgcattatccaccctgctgcactgcctgaacggacagtatcagtatgccgggctggcgggtgaactggtgcagaaagccgaccgggcgtcggtagcgtttaatctcggcggcgatccggtcaaggctatccaccgcccacaaacctcgctgccgcagcaaatcatcgccgccctgcgcgacctgctggcgcatgagttccgactcaataacccgaatggtggttctgacggctggctgacggaagaggcgctgtggctggtcagcaagaacgctgccgatgctgtccgtggctggttgctgcgccagggtattgacgccgtaccgcagcataacgtgcgactgttcgacgagatgcaggcacaccagttgctcattccctgtgaggacaaagccatctggcgatgtcgaattgaggccagcggcggctggagcagcgaacttacgttgctgcgcttttccccttcactgatttgggaagatccgcaacagcggcccgcaacctttggtggaaccgttacgccgatagcggaagtccagaatgcgacagaaacagtgattgcaacggatatcactgtggaacaaccatccccccaacccgaacagaacgatactccactttcaggcgaagccttctggcagtggctggttcgtaatgttcaggctcaacatctggaagtcaatgaacctaacgcccggatccataccgtcgccgggtcggtgtttctggtgacgcccggtattttcaaactctggcttagcacctgcggtcagaatgtccctgaagaatactggcgggaggtacagaagaagttccagaacctgaatcttcaccgaaaacaaaaaaacggcctcaacatctggcactgcgccgttgtcggcccacgccgttgctcacgtctgaagggatatctgcttgacgatcccacgccgctttttggagatgacgttccctttaataaccctcatctcttgtgacggtctgggccgtccccttttgtttggacctggaagagtatttttttgcccgcttattgcgacctgacacccagagctgctattgcacagcggtaaatcagtttacccactggcgcaacgtattacccgctgaagtgacgccgcatatggtgcttgagtggcgtcattacctgctaaatgtgcgctgcatcaagccggtgagctggaaccactatatgcgccatatgcgagccttgtataacttcgcgattgaacagggactgctggaacagtttatcaatccattccagaaaacatcgctgcgggaatctcgtaagaaaaagaaaaccctgacccgcgagcaaatccttgcatcccgcaaagtgctgaaccaatttatcgaacgggagaaaatgcagcgcggctatcgctcgcctttatatccggcatggttttggctgaccgtggttgaaaccttcaactacaccgctatccggctgaatcagcttattcacctgcgggtcagggatatcgatttggtccatgacacgctgtttattcagagcgaaggcagcaaaagccatgatgaacacgttgttcctatcgcctcccggttacggccctatctggagcagatgcttggagaagcgaaaacaaagggaatgcgggctgacgatcagttgttcaacatcaatcgtttcagtcggaggacgctgcgccagggtaaaccgatgacagaaaatcaggtgagttatttctttgccaaactcagcgatgcctgccacagccgtttttcgtcacaccgctaccgtcataccgttgccacagaattgatgcagaaaccggagcaaaatttgtatgtcacgcagaaactactcggccaccgcgatattaaggtgacgctcagctatattgaacacaatgtcgagatgctcagaagttgcgtggagagagattgacaaaacagggagtgagtgaaaagatccggcccgaggctttataaacaaaaaaagccggagatgcggccattttgtaattgccgtcaacgtccagcttcattgtacaacgtactgattgttgtaggttttccgattatcacaatcgtttttggtgccgaaggccggactcgaaccggcacgtatttctacggttgattttgaatcaactgcgtctaccgatttcgccacttcggcactgaagggatacggaaaacgttttggattatacctgtcgatagccgccatgcaagcgacagcgtgcatcagtcgtgctaagtgttgaaaaaaacagcgtaatcccacaaacgagcggtgcggcgtcacatttttacccatcaatgcgcagcaaaccggctccctggccttagcttccctgcccctacgaccaacacatcacaatcccgctccaatttttctcaaacccatctcacattacaccctcatcgcgtcaacgttttatcgccgccaaccataagcatttacgcttcctcaaacactcaatataagattccagaataattaatgtaattgatttatatattccataaaaaactactccatcgctttttcttattaccgcaatccttaaggatttattaattacgtcaatatttttataactttacattaatgaaaagttttgttttcgctctttattccaggattttcctcaggcgtgaaagttccggtaaatactatttttactagtcgctgtacgagtctcgatggacatcttcactcggtgaatttactcaggagaaagactgtgactaccttaaaacctttactggcgcgtaaccgcagctgggcgctgcagaagtgccagcatgacccggaatattttgaaaaactggtggccgggcagcggccacattcgctgtggattggctgctccgatagccgcgttcccgccgaagtgctcaccggcagccatcccggcgaactcttcgtccaccgcaatatcgctaacatgattgaccccgccgacgacaactttatgagcgtactgcaatatgccctccactatctcgaggtcgaacgggtggtgctctgcggccactacggctgcggcggcgtgcaggcggcgctctcgttgccggagatgccgctagcccgtgagtcctcggcgctggcccgccgcatcggctcgctgcgcgataccctgcagggtgatatcgctactctgacgctcactgacactgaccctgacgccgacgcggccgaagcgctcaacgccctggtggaggccaacgttcgcgcccagttcagccgcctgcttgactgtgaacccgtacagacgctgctcgccagcggacggccgctcagcctgcacggctgcgtctacgatctggcatccggccatctgaccactctcgtcgaacacctctcacctcaggagcatgccccatgaatactcttcgtcaggactctctcgcaggcattgtcgtcttccttgtcgccctgccgctgtgcctcggcatcgcccaggccagcggcttaccgccctttgtcggtctgctaaccggtatcatcggcggcctggtcgtcaccgccctcagcccctcccgcttcgccgtcagcggccccgccgccggactggtcaccatcgtcgtcgccgctattgaatccctgggttccttctccgtcttcctgatggcgctggtgctggccggcgtgctgcagctgctgttcggcatcctgcgggccgggcgctttatctcgctggttcccgccagcgtcatcaaaggtatgctggcggcaatcggcatcctgctgattatgcagcagatccccgtcgcgcttggcagcgcagaagagaccgagctcgccgatatcgtgcagggtaacgccaccttctccctcagtgctatcgccgtcgccttgggcggcctgctggtgctatggctgtggggttcgccgcttatccgccgcgtgaagagcctgcgctggatccccggcccgctgatcgctgtcctactcggttgtgccaccaccgtattaatgacccaggccgcgccgcagcagcttgccgctctgccgcgcattaccctgccggagttcggtagcctcggcgatctgctgggcgagctggagtctcctgcgtggagcgcgtggcgtaatccgtcggtgtgggtggtggcactgaccctcgcgctggtcgccagcctcgaaaccctgctcagtcaggaggcgctgaaaaaactgcgtccgcaaaatccgccgccttcgccgaaccgcgaaatggtcgcccagggcgtcggcaacctgctctccggcgtactaggggcgatgccgatcaccgcggtcatcgtccgcagctcggtcaacgtcagcaacggcgctcaaagcaaactgtcgatctttatccacggcgtgctgctactgatctgcggactgtggtttagcggcctgctgacgttaatcccactcgccagcctcgctgccgtactgctgtacaccggctataagctggcgacgccgcggctgttcattgaacagttccgccagggcgccgcacagtacgtccccttccttgccaccattggcgggattatcggcttcggcatgctggcggggatcgggattggcctcgccacccaggtggcgttcagcatctggcgtagccatcgccattcgctgcagctggcgcgctacgacgaccactacgtgctgcgcatccagcaaaacctgacctttttacacaatccacatctgctggcgctgctggcgaaaattccggaaaagagcgtggtgatcgtcgagcacgataacgtcggctatcttgacccggatgtgcaggcggtgctggatgattttgccgagagcgcgccgcagcgcggtatccgcctcaatcagtggccgcttgccagccgctgaccgtctcccgggcggctggtccgcccgcttatccacccctcctaatgccaagcgacgcctgttgccatgctctacactttcttcgttactacgccaaccccaaggaaacaaacatgagcatcattaaaagttacgccgccaaagaagcgggcgccgatctgtcgctgtgggagtacgatgccggcgaactgttgccggaagatgttgaagtcgaagtggagtactgcgggatttgtcattcggacctgtcgatgatcgacaacgaatggggcatgtcgagctacccactggtcgccggtcacgaggttattggtcgggtggcggcgctgggcagcgcggcacgggataaagggctgaagattggtcagaaggtcgggatcggctggacggcgcgcagctgcggccactgcgacgcctgtatcagcggcaatcagatcaactgcctggaaggctctgtaccgaccattatgaaccgcggcggcttcgccgataagctgcgcgccgactggcaatgggtgatcccgctgccggagagcatcgatctggcttccgccggcccgatgctgtgcggcggcatcaccgtcttcaaaccgctgctgacccaccacgttaccgctaccagccgcgtcggcgtgattggtatcggcggcctcggccatatcgcgattaaactgctgcgggcgatgggggcggaagtgaccgctttcagttccaacccggcgaaagagcaggaagtgctggcaatgggtgccgaccgcgtggtgaacagccgcgatccgcaggcgttaaccgcgctggccggtcagttcgatctgatcatcaacaccgtggcggtggatctcgactggcaaccgtacttccaggcgctggcctacggcggcaacttccacaccgtcggcgcggtaatgaagccattcccggttccggcctttaccctgatcggcggcgaccgcagcatctccggctcggcgacaggtaacccgtccgaactgcgtaagctgatgaaattcgccgggcgtagcaaagtggcgccaaccaccgaactgttcccgatgtcgcaaattaacgaagccctgaagcacgtgcgcgaaggcaaagcccgctatcgcgcggtactaaaagccgacttctgattggtatttaccgccgggcgtcccgtgcgcccggcgcttttcttcttgcttcatcaaaccgtcatctccccgccattcccctgtagtcatcgcttcccacaatccgggcttccataaacgcctgaacgagacgcccgtcaccatgaataagcgctggctcccctggctgatactgtcgccttccctgttgtttttactgctgtttacctggtttccgcttggccgttcggtctatgacagcctgtttgatacccgcatggccagcgacggcgcacagtacgtcgggctggataacttcgcccgcctgtttgccgacggcgttttctggcaatcgctggtcaataatctgctctatatcctgctgacggtggtacccggtgtgacgctcgctctgctgctggcggtggcgctgagcgagaatcaccgcgtcaaccgctggttgcgcaccgcctttttcttcccgatgattatcccaatggtcagcgccgccgcgctgtggctgtttatttttatgcccggtctcggcctgctcgatcactatctggcgaagctatttggccctcagaacaacaactggctggggcgcagcaacagcgcgctgctggcgctggcgctgattggcgtgtggaaattcgctggctactacatgctgtttttcctcgccgggctgcagagcattccggcctcaacgcgggaagccgcgctgatggaaggggccagccgcacccaggtgttttttaaggtcacgctgccgctgctgcgcccgacgctgagctttgttatcaccaccgcgctgatttactccattacccagattgatcacgtcgcggtgatgacgcgcggcgggccggataacgccacgaccgtgctgctctattacatccagaatctcgcctgggatacccacgacctcggcaaagcctccgccgccaccttcctgacgctggccgggctgtttgccttctcgctgattaacctgaaattgctggaaaaaggagcccactatgagcgctgaaatctcgccgctgatggtccgctcgcccgccgctgcgcgtccgctgtggttgcgcctgcgtcgctcacagccctttaccctgacggtaatcatgtgctgcctggcgctgctatgggtgagcccgtttatctggatgctggcgacctcgttcagcgccaccaccttcggcgaagatatggcctcattgctgccgcgcctgccgctgaccctcgataacttccgcgacgcctgggacagcgccgactggctgagcctgtacgccaacacccttatctttaccttcggcactttcttcgtgcagctacttaccatcaccaccgccggctacgtcttcgcctgccacgaatttcgcggcaagaaaatgctatttctgctgtttctcgtccagctgatgatcatgccggtggtgatgatggtgccgaacatgctgaccctgaaaaccttcggcctgctcaacactctgaccggcgtgatgatgccttactttacctcggcgttcggcgtgtttctgatgcgccaggcgttcctcgccatcccgaaagagctggaagaggcggcgctgatggagggctgccgctggtggcaagtgctattccgcgtactgctgccgatgtcctggccatcggtgctggccttcgccaccgtcagcattacctaccactggaacgagtacctgtggccgctgatgatgctcaacgatcccgataagcaggtactgacggtcgggctggtctctttcgctatgggcgctgaatccggcggccagtggggcaccatcggcgccgggacgctgatggtctgcctgccgctgatgctggcgttcatccttttccagaaacagttcctgcgaagcttcggcttctccgggatcaaataaggagttattcatgctgttagcgcacatttccgatacccatttccgcagccgcggcgagaagctgtacggctttatcgacgtcaatgccgccaatgctgatgtggtttctcaacttaacgcgctgcgcgaacgcccggatgcggtggtggtgagcggcgatatcgtcaactgcggccgcccggaggagtatcaggtcgcccgccagatcctcggcagcctgaactatccgctgtatctcatccccggtaatcacgatgataaagcgctgtttctggagtacctgcagccgctgtgcccacagctcggtagcgatgccaataatatgcgctatgcggttgacgacttcgctacccgcctgctgtttatcgactccagccgcgccggcacttcaaaaggctggctgaccgacgagaccattagctggctggaagcgcagctgtttgacggcggcgacaaaccggcaacgatctttatgcaccacccgccgctgccgctgggcaacgcgcagatggacccgattgcctgcgaaaacggccaccgtctgctggcgctggtggagcgtttcccgtcgttgacgcgcatcttctgcggccataaccatagcctgaccatgacccagtatcgccaggcgctgatctccaccctccccggcaccgtccatcaggtaccgtattgccacgaagacactcgcccgtattacgatctctcgccggcttcgtgcctgatgcaccgccaggtcggcgaacagtgggtgagctaccagcactcgctggcccactacgccgggccgtggctgtacgacgaaaacatcagttgtccaacggaagagcgctaaccactatgctcagtctgcaaaacatcagtaaacatttcgacggtaaaccggcgctcagcgcgctgtcgcttgatatccacgaaggtgaatttgtggtgctggtcggcccgtcgggctgcggtaaaagcaccctgctgcgcctgcttgctgggctggatcaggtcagtgaaggcgaaatctggttgcatgatgagaacatcaccgacaccacgccgcgcgaacgcaattttgcgatgatcttccagaactatgcgctgtttccacatctctctgtgcgcgacaacatcaccttcggcatgaaggtgcgtaaggaagaaaaaagcggctggcagccgcgggtagataaagtcgcgcagatgctgcagctggaggcgctgctcgatcgcaaaccggcgaagctctccggcggccaacggcagcgggtagcgatggcgcgggcgatcgtgcgtaatccgcggctgttcttaatggatgaaccgctgtccaacctcgacgctcgcctgcgcagcgaagtccgcgacagcattatggacctccaccagcagttaaaaaccagtaccgtctacgtcacccacgatcaaaccgaggccatgtcgatggccgaccgcatcgtggtgatgaacggcggtcacgtgcagcaggtggggcggccagagtatctgtatgccaacccggccaatctgttcgtggccggatttatcggttcaccggcaatgaatctgctatcgctgccctgcgttgacggcaacgttcagcttggcgaactacgccatccgctaccgccgcgccaccgcagccagacccgcgtctggctgggcattcgcccggaacatattaccgaccgcgtggagcaaggccatctgcgcctgccgggcaccgtcctgcaacgagaactgatgggagccgattatctgctccacgtcagcacgccgatcggcaccctgcgctttagccgccgccaccgcggcacggtacctgaaaaaggcgaatcgatgatcctcggcttctcgcctgccgatgtgcatctttttcatgctgagacccagcataatttactgatggagtgtaatcatgtttaaacccttaaccgccctgacggttgggctcagcctcgctctgagcggcgcggcgctggcgaaagagaaaatagacttcatgtttccggccccggtagacggcaagctgacgatggagatgacccgcgttattaaagcgttcaacgactcgcagcaggatgtcgaagtacggggcatcttcaccggtaattatgacaccaccaagatcaaagccgaatccgcacagaaggccgggcagccgccggcgctggtgatcatgtccgccaacttcactaccgatctggcgctgaaggatgagatcctgccgatggacgaactatttaaatatggcgatcaaaaggctggcgattttctgcaaaaggagttctggcccgcgatgcataagaacgcccaggtgatgggcaccacctatgcgatcccgttccataactcgacaccgatcctctactacaacaagacgctgttcgatcgggcggggatcgcgcaaccaccgcagacctgggccgagctgctgtctgatgccaaaaagctgaccgatgagagcaaaggccagtgggggatcatgctgccgtcgaccaacgacgactacggcggctggatcttctcggcgctggtgcgcgccaacggcggtaaatatttcaatgaagactatccgggtgaggtttattacaactcgccgaccgctatcggcgctctgcgcttctggcaggctctgatctacaaagacaaagtgatgccttccggggtactgaattcgaagcagatcagcgccgcattcttctccggcaaacttggcatggcgatgctcagcaccggcgcgctgggctttatgcgcgagaacagtaaagattttgaactcggtgtcgccatgctaccagccaaggagcagcgcgcggtgccgatcggcggcgccagcctggtaagctttaaaggcatcaacgacgcgcagaagaaagcggcctaccagttcctgacttatctggtaagcccgcaggtgaacggcgcgtggagccgctttaccggctacttctcgccgcgtaaggcttcgtatgatacgccggagatgaaagcatatctgcagcaggacccgagggcggcgatcgcccttgaacagctgaagtacgcgcatccgtggtactccacctgggagaccgtcgccgtgcgtaaggcgatggagaaccagctggcggcggtggtcaacgatgccaaagtaacgccggaagcagcggtacaggcggcgcagaaggaagctgacgcgctaatgaaaccttatgttgataagaccgcgctggaagaagtgaagtagcgcagttctgtagcggggcgcccggcttgcggcgtaaacgcccaggccgggtgaccaaccgcccccagcgcaggatgcgccggggagattttgcgaagccttagattttatccgcctgcgacgaagcccaggatttacgcgcgtaggcttttcccgccgggctggtatccagcttctcgcgcagatagtgttcgatctgctcaaggctgcggttgcgtgtttccggcacgcatttgatcacgaagatcgcgccgaagataccgattgccgcaaagataaagaaggttccggagaggccgacccacgacaatagcatcgggaagaacagcgagatcaggaagttggcaatccacattgagaacaccgccccgcccataaacatcccgcgcatccgggttgggaaaatttccgacaacagcagccaggtcactggcgacagcgccccctgctggaaactcagaaacagcagcattcccgccagaaccatataggcgcgcagcgcatccggctgaccattgaccgtttccggcagcaggtagctcaccgcgccgataaacaccaggcaggcggtacagccgaactggccgatcatggtcatcgggcgacggcctatcttccccagcatccagataccgacaaaggtcatcagcaccgaaaccacgccgttggcaatggtcgcgaacagcgcggcgttatcggtcataccgaccgaggtcagcaccgtcggcgcatagtacataatggtattgacgccggtaagctgctgaataaccgccacgccgataccgatcatgaacagcttaaacagccacggggtcatgatttcacgaatttttggcttaccaagattgcgctgctcgtcgagagtttccgtaatctccattagctcccattcgacatcatctttacgccgcgtacgctccagcacccggcgcgcttccgccagtcggcctttcatcgcataccagcgcggggtatccggcataaacatcatgccaaaccatagcaacacggctggtagcgtcgccaccgccagcatccagcgccaggtactttcaccgccccacagctcatggaaggtggcgttagagatataggccagcagctggccagagacgatcatcagttcctgcagcgtaaccagttgcccgcgtttgttggccggcgccatctcagcgatatataccggcaccgttgccgccgcgccgccaaccgctacgccgagaaccaggcggaagaaaatcatccagttgacgtccggcgcgagggcagtacccaccgcgccgatagcgaagatcaccgccagccagaggatgattttctttctgcctgcggcgctggccagatggccagaaagcagtgcgccgaatgcggcgccgaacagcagcgagctggtcaccagcccagtggtaaacggcgtgaggtgcagttccttacccataaacagcagggcgccggaaatcaccccggtgtcgtagccaaagagtaaaccgcctaaggtcgcaatcaacgcaacgatcttaacaaacggcgttgccggggcgtcgctattcggccccgacgctttattgagtgtgagatattgttcctgtgacatagaagactccagtaacctaccttgtagggggaagatatgctcttgtctgaatacagaggcctcctgcctcacggacgtgtcgttctcgtgtggttctcttgaggtttagaaaaagcgggccacgcagctgtgtggcccgaaatgcatcaacgatcagattcctgccgtttcgcggatgtacttacgcgcctttacggcgtattcgaaggggttcgccagcgcggggtcttgttcggcttccactaccatccaacccttgtagccgtagtcatccagcaactggaagaccggacggaaatctatttcgccgtctcccggtacggtaaaggtgcctttcttgacgccatcgaggaaggagagcccttcgcggcgcacctgctcaattaccgcggggcggacgtctttcagatgcacgtggttaatgcgcggcagatattttttcaggatcgacagcatcggcgcctcgccgccctctgaataccaggcgtgaccggtgtcgtagagcaggaagacgcgttcgtccaccagcgacataaaattgtcgatctccgcggcagtctgaatgccggtgcccatatggtgatgcaggcaaacctgcatccccttctctgccgccagtttgccaagcgcgttataaccttcagctacccgctgccactcttcgtcgctaaagcacggctttacatcgccgagaatcggtttatcgagcccctggatactgccgctttgttcagagcaaccaatcacctttgcgcccatcgcatggaggaaattcatgtggttaacgaattcatcgatggttttttctctttggccattcgcgaagaaggtgctgaaccaggcgttgcaaatctgcatgccgcgaatatccagcatcggcttcagcaccgccggatcgcgcggatatttgctgccgacttcgctgccggtaaacccggccagcgccatttcgctgaccgtttgctggaaggtgttttcactccccagctcaggcatatcgtcgttagtccaaccgataggggcgatagccagtttgacgttgtctttgttcattttgatgctcctgccgccgcgccttaccggcgcagcagttcacgttcgataagttcacgcgtttccacggcctggtatttcatcttttccgggtaaccaaacagcgaggtgcagacgatcggttcaccgccaactttgaaggtctgttcagcgaagcgcatatcgcgcagggtgcggaacagagcatcgaaatcgacatccccctcgccgacgccgacgtgctgatgtacggcggcgtcaacgcccggcggatttacgatatagcggcagtgtttggtgtggttgcgggtatcggcaatcagcacgtgcgacaggtcctgaccggcatagcgcagcatcttctcgacttcacctttacctttgtcgtagaagaaggtgtgcggcacgctgtagacgtacttcacgttgtcgctacggaaggacttcacgatatccaccgtctcgttgttttcttcgcagaagtcccacgggtgggcctggatttcgacgcggataccttcacgttcgaatatcggcagtaattcttccatcgagcggtagaacatttcttcgcaaatttccggctggttaggatcgccagaaaattcggtgttgataacctgcacgcccatctctaccgccacttcgatgagcctcttccagttcttcaccgccgcttgacggcgcagctcatccgggccggaccagcgataaacgcagatgaacgaggagagttcaacgccgttgtcacgcagcgcctgcttatactcggccatgatctcccggctggcgcgcggatgtttgtagaatgggttaatctgcgggtgcggcgactgttcaatgtatttgtagccccactccgccacctgctgaaccattctggtgatcccgagatcgcgaatcacatcgacatcaaaagcaattttcatcgtcgttacctgtttgaaacgttacgtcggtgaaggaggatttagcgttggtagaatgccgggcactcaggcagcgacactgctaccggttcgttgcactcttgcgccttcagacaggcgtcggcggcaaccgatgccgcatagccgtcccaggcggaggggccctgcagcttgccggctttcacatcattgataaatgcctgcagttcgacgtcgtaggctttgatgaaacggtctttccagtcggtgaggatagctgtcgacaggctggcggctttacgcatctccaccgccgacggttccggcaggcgcgcaatgcccgtttcgccaaccacctcacactggatgtcgtagccgtactggcaatttacgaagacttcgacgtcgatcagggtgccctttttcgtttcaaacgagacgatctgtgggtctttcagccgcgcatgggtatgggaggtcgagcgcgggaagcgaacttgtacggagcggtagtcatcatttagcagccagcgcagcacgtccagctcgtggatcagggtgttggtgatcgccatatcggtggtgtagttctcgccgaccgactggttgcggtgggcgcagcgcagcatcagcggcgcgccgatatcaccgtcgtcgatgaccttcttcaacgccagatagccttcatcgtacgggcgcataaagccgacctgaacgaggcgacgcccggctttcatttcagcatcaacgatgcggcggcagccttccgcgctcatcgccaacggcttttcgcaaaagacgggcttaccggcctcaatagccgccagggtgtactcttcatgggttggatcccaggaggtcaccagcacggcgtcaacgtcgctggctttaatcacatcatgaccgtcggcgtagacttccgcctgtacgcccggcagcgctactgccgcacgggcgttttcggcgttgatatcggaaacggcgaccacggtcgccccctgtaagacctgggtgcagcgacggatatgttctttaccgatggcgcctgcgccgatgacacctaatttgagtgacatgatggttctctccgtagttctgtagggttcagggttcgtgttctttgttagtaatcccgcgcctgggcgcgtttttcattaatcatttcagcgactttacggatacgttccgacagcgccgtctgcgccacgccaacgttccaccagctaccgtatttgtggaccatggttttcggcagtactttaatgtcgataagcgtgctgacggtttcacggcgagcggcatccagcgcgtggcgaagctcatcgagggtggtgacccgccaggtcttgcagccgtagccggaagcgatcgtggcgaaatccaccggtaccagcccgccctgcagctggccgttttccgccgagcggtagcgaaactcggtgccgaagctatccataccgtgttccaactgcaggttgttgatgcagccgttcgccatgttgtcgagcagaatgacgttgatcttcgcccgctcctgcagggaggtgaccagctcagagtgcagcatcatgaaggagccatcgccgaccagcgaatagacttcgctctgcggctgcgccagcttaacgccgagggcggcgttgacctcatagcccatgcacgagtagccgtactcgacgtgataggtattcggcgcgcggttgcgccagacgcgttgtaaatcccccggcaggctgcccgccgccgccacaatgaccgcatccgccgccagcgactcgttcagcaggccaagaacgctgctttgcgtcagggtggaatccgtgatttgacggaattcgcgataaaccgattcacggtcaatatggtcgtcaatttctggtacgaaatccttttcctgccagaccgcctgatagacgcgctgggtctctttcatctgccggctctgcacgcttgcaatctgcgcgccccatcctgcctgccaggactcgttctccagcgcagcgctgagcgcgcttaacgcctcgcgggcgtccgccagcattgggataccgtccagcttccaggcatcaaaattactgacgttaacgttaaggaagcgcacgcccggggattggaatatccatttcgaggaggtggtaaaatcgctaaagcgcgtgccgataccgatgaccagatcggcctctttcgctaacaggttggcagccaggcagcccgtttcgccaacgccgccgacgttcagcggatgcgatgaaaccaccgtgccctttccggcctgcgtttccgcaaacgggatgtcgtaacgttcggcgaagctcaccagcccttcgcctgccgcggaatatttcacgccgccgccgcagacgatgagcggtttacggctggctttaattgcctctaccgcatccgccagttgcgccgcgcttggcggacggcgatccagacggtggacacggcgggcaaaaaaggactcgggataatcccaggcttcaccctgcacgtcctgcggcagacacaaggtaacggcgccggtttccgccggatccgtcagcacgcgcatggcattaatgcaggcactcatgagctgttccgggcgggtaatacgatcccagtacttactcaccgcacgaaatgcgtcgttagtcgtgatactcagatcgtggctctgttcgatttgctgcagtaccgggtccggctggcgggtggcgaatacatcgcccggcagtaataacagcgggatacggttggccgtagccgtcgccgcggcggtgatcatgttggccgccccgggaccgatggaagaagtgcaggcaatgatctgccggcgcagtgattgacgggcaaagccggtggccgcatgggccatgccttgttcattacgcccctggtaaacccgcagttcgccgctgttctcttccagcgcctggcctaagcccaacacgttgccgtgaccaaaaatagcgaaaatccctttcacgaatttctgcgcttcgccgtccacctccagatactggttatcaaggaatttcaccagcgcctgcgccattgtcagtctcagtttgcccatgttgcctaatccttatcgttcagtatttgtcgtgtgagttagcgctttgctcgccaaagaagatggcgtaggtgcgggaaagccgttaacgtccactggaatatttttggattataggcaaacatttttttcattaaacacaaatacagaagaaatgtttcattttgcgagaaggatcaaactctctacccatttcacacgtttcacttacatctccttcgcgagcaggcttccaaacaaaagaggaaaaacaagattatctacatgaaaaatatggataatgttgatattaaaaaaaggagaacatgggtaagcggaacgcagacagcatgtatgggtgggcagctgcgtacccgcgcagagtggtagatccttcacacttttggttttttaatttcgattagatttgaaaatgaaatatttatttctcaaactagagataactaataaccatcaggctgttcacggcagactgtcactcatgcgaccttctcctggcagcagatttgcaaaaggaaaccctagcgatgaatgcagcagttaagcggctcgacgtcatctgtattggccgggtggccgtcgatctctacgcccagcagataggggcaaggttggaagatgtggccagtttcgccaagtatctcggcggatcttcgggcaacgtcgcctttggtaccgcgattcagggattaaaatcggcgatgctggcgcgggtgggcgatgagcacaacggccggtttctgcgtgaaaccctcagccgcgcaggtgtcgataccgaatatctgatcacggataaagaacggctgaccgcgttggtgatgctgggcattaaggatcaggataccttcccgctgattttctaccgcgacaactgcgccgatatggcgctgacgcctgacgatatcaatgaggagtacatcgcctcttcacgcgctctggcggtgaccggcacccacctttcacacgccaatacccgagacgcggtactgaaggcgctggaatacgcccgccgccacggcctgcgtaccgcgctggatatcgactaccgcccggtgctgtgggggcttacttcgctgggcgacggtgaaacgcgtttcattgagtcgggtccggtgacccgtcagttgcaggaagttctgcacctgttcgatttagtcgtcggcactgaagaggagtttcatatcgccggcggcagcaccgataccctcaccgcgctgaaaaacgttcgccatgccaccaaagcgacgctggtctgcaagcgcgggccgatgggctgcgtggtgctggagggcgccatcccggatagctgggacgaagtgccgttgcagcaaggcgttcgcgtcgaagtactcaacgttctcggtgccggcgatgcttttatgtccgggctactgcgcggctggcttaacgatgagggctgggagcaggcctgccgctacgccaacgcctgcggcgcgttagtggtttcgcgccacggctgcgcgccggcgatgccgacaaaagtagagcttgatgattatttatcgcgggccgatgccgttccgcgcccggatatcgacgcgcggttaaatcatttgcaccgggtgaccagtcggcgccagccgtggccggaactgtgtatcttcgcctttgaccatcgtaaacagctggcggatctggcattagaaaccgggcgtgacccggcctgtattcccgaactcaaactgctactgttggccgccgccgaggcggccgccacagaggccgggctggatcggcgcagcggcatcctcgccgatggtacctatggtcaacgttcacttaacgccattaccggtaaaggctggtggatcggtcggccgattgagctccccagctcgcgtccgctacgtcttgaacatggtaatattggctcacagctgatcgactggccgcttgagcacgtcgtcaaatgcctggtcttttaccacccggatgacccggcggcgctgcgcgccgagcaggatgcgctgctgctggaagtctggcaggcctgcaataagtccgggcacgagctgctattggaagtgatcctgccggagaacggaccggacaaagatgaacgccactaccacactatgctggagcacttctatcagttgggcatccagccggactggtggaagctgccgccgctggccagcgcccagtgggagcggatctcagcgcttatcgagcgcgaagatccgtggtgccggggcatcctgctcctggggctggatgccccatcggatcgcctgcgtgcaggtttcgccgaagcggccgggcacccgatgatcaagggctttgccgtcggccgaaccatctttggtcaaccttcgcgccgctggatgcagggcgaactggatgacgccgcgctaatcgatgaagtgaagcgtaactatttgcggctcatcggctactggcgcgaagcgcgcggctaacctccttcaggcccgccacttccttgaaagcggcgggcctgcggtttcttcgtgaaatgaatcgcgtatttcatcgcaaaaaatgaaaaattcgcttcatttggtacactggaagccatattccttccattttctcagagcgcaacttatggctaataatccgacccaactgaccatcctgcaggatgaaatcagacggcgctacgacacgctcagcaaacgtctgaagcaggtggcgcgctatatactggataacagtaatagcgttgctttcgataccgtagcctccattgcgcaacaggctgacgttccgccctcaacgctgattcgcttcgctaacgcctttggcttcagcggctttaacgaaatgaagcagatgttcaggcagcatctgatggaagagaccgccaactacaccgagcgcgcgcgtctgttccgccagactactaacgacgaaacaaccccgccggaaacgccgacggaaatcctcaacatgttcagcatggtcaatacccaggcgctgcagcaactggcaatgcagacctccggcgaagatctcaaccgggcggtagatttactggcggatgcggaaaatatctatgttatcggtctgcgtcgctcgttcagcgtcgcctcttacctgacctacgcgctgcgccatctggatcgcaaagcctttctgatcgacggccttggcgggatgttcaccgaacagctcagtctggtggggccgaaggatgtggtcgtggcggtgagcttctcgccttatgcccgtgaagtggtggagctggttgagcttggcgcccagcgcaaggcgcgacaaatcgccattaccgatagccaggtaagcccgcttgccgccttcagtgatgtgtgctttgtggtgcgtgaagcgcaggtcgatggtttccgttcacaggtggcctcgctgtgcctggcgcagacgctggcggtatcgctggcattgaatagcagcaaagagccgcagcagcaccgcgcctgattacccgttgcgctagcggtaaacagaggcaatcaacagacaaaaaagccggggacatccccggcttttctcgtttatcgcgcactatgaatagcgatcgctgttgatccaggcgtgatcgtcttcccaggtaaatagccacttacgatccggccccgccatcacgttcaggtaatagctgttgtaaccggcgatcgccgctaccggatggtagccgcgcggcaccatcaccacatcatggttatagggcgccatacaggcatccaggctgcggtcatcggtgtacactcgctgaaaggcaaagccttgcggcggatcgaaacggtggtagtaggtttcttccagctgggtttcctgccccggcagcgcggtatcgtgcttgtgcgatggccaggaactggtcgccccttcttcggtgtagacttccactaccagcaggcaatccgcctgggcgttatccggcagaatattatgtaccagccgctggttacgccctttaccgcgatgttctacgccaacatcctcaggccgtatcactcgcgccgggaagctgcctttgcccggcgcgctgcaaaccgccagctcaagatcggaatctgcagtgacctcgaccttatcgtgcggcggcacatagaccgaccacggcggcgtacgctcgaatggcgacatgcgtttaccgaggtcgggaaaatcggcgtgctgagttttgatcgaggccagcccggagaccagaaccagacatagctcacgatcaccgctctccagggtcacggtttgcccctgttttaacatccagacatcaaagccaatataatgccaccccgcgctctgcggggtgatgtgctggatatgtccctctttttgcgctttagccaataacgacatagcgttctccttcgccgattaacctaacgtcggcatactgaattcagatacggtttgctgcccctgcggccagcgcacggtggcagttttcatacgggtatagaagcgaacgccgtcaggcccgtggacgttcagcgcgccaaataccgagcgcttccagccgccaaagctatggaaggccattggtaccggcaccggtacgttgacgccaaccatgccggcctgtacatcatgaacgaactcgcgggcggtatggccattgctggtaaagacggcgctgccgttaccaaattcgtggctgttaaccagcgccagcgcgctttggtaatcagcaacgcggacgatccccagcaccgggccaaaaatctcttcacgccagatggtcatttccggagtgacatggtcaaacagcgtaccgccaacgtaatatccgtcctcatgcccggccacgcgcagcctgcggccatccaccaccaacgacgccccttcgctgacgcccttatcaatatagccgagtacttttttctgatgcgcttcagatactaccggccccatttcgttttcgtctttgccgcgcaggcaaccagggcccactttcaacgactcgactaatggtttcaggcgggcgattaacttatctgcggtttcgtcaccgacggccactactaccggcagggccatacagcgctcgcctgcggaaccatacgcgccacccatgatggcattcacggtcgcatcaagatcggcgtccggcatcacgatggcatggtttttcgctgcgccaaaagcctggacgcgttttccgtgagcgctggcggttttatagatatattccgccacgccggaggagccgacaaagctgacggcggcaatacgcgggtcggtataaagctgttcggcatcttcattgctgcaatgaatgacgttaaaaacgccgtccggcagaccggcttctttcagtaattcagccatgcgtaccgccgcggtcggcgccagcgccggtggtttcagcacgaagctgttgccgcaggccagcgcgatggggaacatccacatcggcaccatagccgggaaattaaacggcgttatccccgccaccacgcccagcggctgcatgagcgaatagctgtcgacgccggtacctacgtcggaagaaaactcacctttaataagatgcggaatgccgcaggcaaactcaaccacttccatgccgcgagtcagctctcccaacgcatcggaccacactttgccgtgctcgctaacgataattccagccagttcatcgacgtgctgttcgagcagcattttaaaattgaacagcacgcgggcgcggcgcagcggcgtggtacgggaccagctgtcaaaagcgtcgcgagcgacctggattgcgtcggaaacctcctgcgcggtggaaagcgtgacttcgcgaaccacatcgccagtggccgggtcgtacaccggcatcgtttcccggctgctgctggttaccgttttcccaccaataaagttacctgtgatagtcatcttctcgcctcatagtgtagaaggccgttcaagttacggcccgtcgctgattgtgctgtgctataaccgtagtaaaatgaaatttatatttcaataaacagataaaatgaaattccactttggtgatagctgtcgcatttttcagcaagactctctctacatgatttcatatcgcagcggtagtgaaggtgagattttctgcggttgacgttgatgtaaactatgaaatggcgcagcaactattttgcgatcgtgctcaaacaaccatcatttcatccattgccaatgatgaaataaacattttaactatcaggcaagcgaactaaaccagtcaacatcttgtcaggagtgtcaaatggccattgccctgcagcgtttctgtatcaatcgtaaaattgcgccatcgcttagcattgaagcgtttttccgtctggtaagcgaactcgggctgcataaggtcgagctgcgtaatgatttacccagcggtaaagtcaccgatgagcttacccaccagcaggtgcgcaagctagccgaccgataccagcttgaaattctgacgatcaacgccgtctatcccttcaaccgccacagcgctgaagtacgtcagctgacggagtcgctgctgaaagatgcgcagtccattggcgccaaatcgctggtgatgtgcccgttaaatgatggcaccgttgtagcgccgcaagaaacgcttgccgctatgcgcgagctggcgccgttgttcgaacaatatggcgttcagggcctggtcgagccgctgggcttcccacaaagttcgctgcgctcggcggcgcaggcgcaggcactcattcgtgacgcccaggtaccgtttaagctgttaattgatactttccatcatcatctttatccacaagctgaagaggaattcagccagctggacgttgctgagataggtctggttcatctctccggcgttgacgatccccgcccgcgcgaacagttgaccgacaacgagcgcatcatgctgacaccacaagataggctgatgacctgccagcaggtaaaacatcttgaagcccgcggatatcgtggcgattacgccttcgagcctttcgctccgcagctggcgtcatggcgcgaagaggagattcgccgcgagattgaacagagcatcgcgctgattcagcgccactgcgcctgagattaaacgttgagagttatcgatttcctccatctttttgctgtcaggttgcctataatcgacgcaggataaatggaggaatcgatcatgagctcacccctgctgattgcgcgcacgctggataaacaactgcatctgctgcctgcaatggctaaccgtcacggcctaattaccggcgccaccggcaccggtaaaaccgtaactttgcagaaactggcggagtcattttccgagatcggcgtaccggtctttatggccgatgtgaaaggcgacctgaccggtatcgcggaagcaggccagagctctgagaaacttcaggcgcgtctggaaaaaatcggcgttaccgactgggagccgcatgccaacccggtggttgtttgggatatctttggtgaaaagggccacccggtgcgcgccacagtgtcggatctcggccccctgctgctcgcccgcttgctcaacctgaatgaagtacaaagcggcgtgctaaacattattttccgtattgctgacgatcgcggcctgctgctgctggactttaaagatctccgcgccatcacccagtttatcggtgataacgccaaagccttccagaaccagtatggcaacatcagcagcgcgtcggtcggcgctatccagcgcgggctgttaaccctggagcagcagggcgcagagcacttcttcggcgaaccgatgctggatattcaggactggatgcgtgtcgatgccagcggtaaaggggtgattaatatcctcagcgctgaaaagctctatcagatgccgaagctgtacgccgccagcctgctgtggatgctctccgaactctacgagcgcctgccggaagccggcgacctcgaaaaaccgaagctggtgttcttctttgacgaagcccacctgctgtttaacgatgcgccgcaggtactgctggataaaatcgagcaggtgatccgtcttatccgctctaaaggggtcggcgtctattttgtctcgcagaatccgtcggatatcccggatgccgtgcttggccagttgggcaaccgcgtgcagcatgccctgcgagcctttactccgaaggatcaaaaagcggtgaaaaccgccgcccagaccatgcgcgccaacccggcattcagtaccgagcaggccattcaggagctcggtaccggcgaagcgctgatctccttcctcgacgagaaaggcagcccgtcggtcgtcgagcgcgcaatggttatcgctccctgctcgcggatgggaccggtcaccgatgatgagcgaaatggcctgattaaccactcggcgctgtacggcaagtatgaagaagagattgaccgcgagtcggccttcgaaatgctgcaaaaaggggtgcaggtcgccacagagcagcagtcggcaccgccggcaaaaggtcaacaaaacggtgatgatgacgggctactcggtggactgaaagatattctgttcggcactaccggcccgcgcggcggtaaacgagatggtatcgtgcagaccgcggccaaaagcgccgtacgtcaggtaaccaaccagatcgtccgcggcatgctgggaagcctgctcggcggaaggcgccgttagcgcaaggacaccgaccccggattgtggcgcgctgcgcctcatccgggttatttgttggctcggtgagcgtaagcgttaggccttagtcgcctcagggggttgtcttaacataatccccatatccccgcgcgcttttgcgcgcttcgaggcggtgattgccacgccagcacagcgccagcacggcgaccaccgcaacctgatgaagatatagcggcaggcctttgtctaacaccacgaaagcaaacagaaaagcgaatatcgatagcgacagtataacccccgctaacgtgccattgagatcgaaccaaaacagcacccgatcggctttttgctcttctgctgtgcccgcacgcaccagccccgtcgtcaggctcagcacatccgctcgtttcaacgaccagataaaaaacaccagcataaacagaaaaactgtgccttcaaacaggaaccagccgctggcccactctggatgcaacgcgccgaagaagatggtggcgatgataaaaatatccgggatccacaagattccggcagcgacctgcagaatgaatatcagggatttaccaaacatcaatgcctccatgcaaagacgaaaaaaaagggtgctttcgcacccttctattgtactacgcttttctcatcatcagccaaaggcttatcaggaagaaacttgcgcttggcagcagcgcgccgattatcggcggtatcccgtaaaccaacgtcagtgggccaaatatctggtcgagtacgtagaagataaagccgaagctaatcccggtaaccactctcacgcccatcgccacgctccgcagtgggccaaaaatgaacgacagcgccatcagcatcatcacggccaccgacagcggctggaagattttgctccacatattgagctggtaacggcccggatcctggccgctggacttcagataggtcacgtagttatgcaggccgctgattgacagcgcatccggatccagcgcaaccacgccgagtttgtccggcgttagcttggtcttccaggtgccgctcaccatttgcgtaccggtgacctgttttggatcggtgagattagattcatccacctgcgacaggcgccagatcttagcttcattatcaaacttcgcggaagcggcgtagcgaactgattgcagacgacggttatcgttaaactggtagatgctcacgccacccagctcatcgttgcccttcacccgctcaatatagacaaaattatgcccgtctttcgcccacaaaccctgctgggtcgacagcagcgaaccgccgtacatctgctgcgcacggtagttgcgcgccatctgttcgccctgcggcgccacccattcacccatcgccatggtcaacaacaccagcgggatcgccgttttcatcaccgccagcgccacctgcatacgggtaaaaccggaagcttgcatcaccaccagttcgctgcgctgcgccagcatccccagccccagcaatgcgccaagcagcgccgccatggggaagaagatttgcacatcttttggtacgctgagaatggtataaagcccggcgcccattgcatcatagctgccctgtccggcttttttcagctggtcgacaaacttaataatgccggagagcgacaccagcatgaacagcgtcatcatgatggtgttgaaaatggttttaccgatatagcggtcaagtacgccaaacgcctgcatcacaccgctcctttattaaaccgggcacggaaacgacgcatcggcaccgtatcccacaggttaagcagcaccgccagcgcgaagtagagcaggttcacgccccacatccagatagcggggtccattttgcctttacccgcgttcgatttgatcgacgtttgcagcaggaagaacaccagatatagcagcatcgccggcagcatagacagcacgcggccctgacgcgggttcaccacgctaagcgggacaaccatcagcgccatcatgaacaccgccgccaccagcgtaaatcgccagtgtagttcggcgcgcgcgcgcgcggtatcggtcttccagagggtgcgcatattcatctgttcggtgtcgctgggatcggccgctaccgcttgatggccaattaccgcctggtagtttttgaagtcggtaatacggaaatcgcgcagcatcgccgtgccttcaaaacgcgtcccctgagtcatagtgaccacctgggatccgtcttttttctgcgacagttcgccggaatccgccaccacaacggaaggacgcgcgttaccttttggccgcaattgcgcaaggaacacgtcgttgaagcggttgccgttcacgttttcgataaacaacaccgcgctgccgtcgctggcctgctggaactggccctgagccagcgccgccattccagggttggctttggcttccgccagcacttcatcctgatggcgcgacgaccacggccccgcccacatcacgttgactgccgcgacggcgccggtaaacagggcgaggatcattgccgccttaatcaatacggctttacttaagccgcaggcgtgcatcaccgtaatttcgctttcggtatacagtttacccagcgtcatcaacaacccgaggaaaagactcaggggcagaatgagctgcgccatttccggtacgcccaaccctaacagcgagagcaccaggttggtcgggatatcgccatctaccgcggcgccaaggatcctgacgagtttctgacagaagaaaatcagtaacaggatgaataggatcgccaactggcttttcagcgtctcacgaaccagatatcttatgattatcactataaatacgcccgtaaaaacccgtcttattgcaggaaaattgcttgtttcatggcttaaacgtcatttattctcttttgtcgtcgaaaacatcgctaagattaaatgactcatcggttctgcgtatcaggatcttttctgacgaaccaaggccgtaataacgttaagattaacacgaagtcaccgcaacagcggacatgagttacgaaagcttgcaattatatactcaatggatttcgagttgtagaaaggcggcaggactgtgaagccccaaagcggcatcagccagcgtcaggggtaagcaggcgtagccaacgcatctgcaactggaaaggcgacgagtatagccgtagccaccactgttgtctttaagattcaggagcatagtgcatggagttcagtgtaaaaagcggtagcccggagaagcagcggagtgcctgtatcgtggtcggcgtcttcgaaccacgtcgcctctcccccatcgccgaacaactcgataaaatcagcgacggttacatcagcgccctgctgcgtcgcggcgagctcgaaggcaagcctggccagacgttgttactgcaccatgtgccgaacatcctgtctgagcgcattctgctcatcggctgtggtaaagagcgcgaactggatgaacgtcagtataaacaagttattcagaaaaccattaatactctgaatgacactggctcgatggaagccgtctgcttcctgaccgaactgcacgttaaagggcgcaacaactactggaaagttcgccaggccgttgaaaccgccaaagagacgctgtacagcttcgatcagttgaagaccaacaaaagcgagccacgtcgcccgctgcgtaaaatggtctttaacgtgccgactcgccgcgagctcaccagcggcgaacgcgccattcaacatggcctggcgatcgccgccggtatcaaagcggcgaaagatctcggcaatatgccgccgaatatctgtaacgcggcttaccttgcttcccaggcgcgccagttggccgacacttacagcaagaacgtcatcacccgcgtgatcggcgagcagcagatgcgcgagctggggatgaactcctatctcgccgtcggcaacggctcgcagaacgagtcgctgatgtcggtcatcgagtataaaggcaacccgtctgaagacgcgcgccctatcgtgctggtcggtaaaggcctgaccttcgactccggcggtatctccatcaagcctgccgaaggcatggacgagatgaagtacgatatgtgcggcgcggcggcggtctacggcgtaatgcgaatggttgccgagctgcagctgccgctaaacgtcatcggcgtgctggcaggctgtgaaaatatgcctggcggtcgcgcgtatcgcccgggcgatgttctgaccaccatgtccgggcagaccgttgaagtactgaataccgacgccgaaggccgtctggtattgtgcgatgtgctgacctacgttgagcgcttcgagccggaagcggttatcgatgtggcgacgctgaccggcgcctgcgtgattgccctcggccatcacatcaccggcctgatgtcgaaccataacccgctggctcatgagctgatcggcgcctccgaactggccggcgaccgcgcatggcgtctgccgctggccgacgagttccaggatcagctggagtccaactttgcggatatggccaacatcggcggccgtcctggcggcgcgattaccgctggctgcttcctgtcacgcttcactcgcaagtacaactgggcgcacctcgacatcgccggtaccgcctggcgttccgggaaagccaaaggcgcgaccggccgcccggtggcgctgctgtcgcagttcctgctcaatcgtgcgggttttaacggcgaagagtgattgccgtctgatgcccggtggcgctaagagtgattgccgtctgatgcccggtggcgctacgcttaccgggcctacggaaaaatgccgtatgtaggccgggtaagcgtagcggccgggtaagcgtagcgccacccggctttgcatttaaatccacaacaagaagccccatatatgaaaaacgcaacgttctatcttctggacaatgacaccatcgtcgacgagctcagcgccgtcgagcagctggtgtgtgaaattgccgcagaacgttggcgcaacggcaagcgcgtcctgatcgcctgtgaagatgaacagcaggctattcgcctcgacgaagcgctgtggacgcggccgccggagagctttgtgccgcataacctggcgggcgaaggcccgagaggcggcgcgccggtagaaattgcctggccgcaaaaacgcaacagcagcccgcgggatattcttatcagcctgcggctaaactttgcagattttgccaccgctttcacagaagtgatagactttgtcccttacgaagattctctgaaacaactggcgcgcgaacgctataaagcgtaccgcatggctggtttcaacctgaacacggcaacctggaaataatggaaaagacatacaacccacaagatatcgaacagccgctttacgagcactgggaaaagcagggctatttcaaaccgaatggtgatgaaagccaggagagcttctgcatcatgatcccgccgccgaacgtcaccggcagtttgcatatgggtcatgccttccagcaaaccatcatggataccatgattcgctaccagcgcatgcagggtaaaaacaccctgtggcaggccggtaccgaccacgcgggtatcgctacccaaatggtggttgagcgtaagattgccgctgaagaaggtaaaacccgccacgactacggccgcgatgccttcatcgataaaatctggcagtggaaagcggaatccggcggcaccattacccgccagatgcgccgcctcggcaactccgtcgactgggagcgcgagcgcttcacgatggatgaaggcctgtccaacgcggtaaaagaagtcttcgttcgcctgtacaaagaagacctgatttatcgcggcaagcgcctggtcaactgggacccgaaactgcgcaccgccatctctgacctggaagtagagaaccgcgaatcgaaaggttccatgtggcacatccgctatccgctggccgatggcgcgaaaaccgctgacggtaaagattacctggtggtcgccaccacccgtccggaaaccctgttgggcgataccggcgtggccgttaacccggaagatccgcgttacaaagacctgatcggtaaattcgtggtgctgccgctggttaaccgccgcattccaattgttggcgacgaacacgccgacatggaaaaaggcaccggctgcgtgaaaatcaccccggcgcacgactttaacgactacgaagttggccgccgtcatcagctgccgatgattaatattttgacctttgatggcgacatccgcgaaagcgcggaagtctacgataccaaaggcaacgaatccgacgtctattccaacgagatcccggctgaattccagaagatggagcgttttgccgcgcgtaaagcgatggttgccgccgtcgacgcgttgggcctgctggaagagatcaaaccgcacgacctgaccgtgccttacggcgaccgcggcggtgtggttatcgaaccgatgctgaccgaccagtggtacgtgcgtgcggacgtgctggccaagccggcagtcgaagccgttgagaatggcgacattcagttcgtgccgaagcagtacgaaaacatgtacttctcctggatgcgcgatattcaggactggtgtatttcccgtcagctgtggtggggtcaccgcatcccggcatggtacgacgatcagggcaacgtctacgttggccgcaccgaagacgaagtacgccaggaaaataatctcggcgccgacgtcgcgctgcgtcaggatgaagacgttctggatacctggttctcttccgcgctgtggaccttctccaccctcggctggccggaaaacaccgacgcgctgcgtcagttccacccgaccagcgtgatggtgtccggcttcgacattatcttcttctggatcgcccgcatgatcatgatgaccatgcacttcatcaaagatgaaaacggcaagccgcaggttccgtttaagaccgtctacatgaccggccttatccgcgacgacgaaggccagaagatgtccaaatccaagggtaacgtcattgacccgctggatatggttgacggcatcaccctgccggagctgctggagaaacgtaccggcaacatgatgcagccgcagctggcggaaaaaatccgtaagcgcaccgagaaacagttcccgaacggtatcgagccgcacggcaccgacgccctgcgtttcaccctggcggcgctggcctctaccggccgcgacatcaactgggatatgaagcgtctggaaggttaccgtaacttctgcaacaagctgtggaacgccagccgcttcgtactgatgaataccgaagatcaagattgcggtttcaacggcggcgagatggtgctgtccctggccgaccgctggatcctggctgaattcaaccagaccgtgaaagcgtaccgcgaagcgctggataacttccgcttcgatatcgccgcgggcatcctgtatgaatttacctggaaccagttctgcgactggtatctcgaactgaccaagccggtcatgaacggtggcagcgaggcagagctgcgcggtactcgtcatactctggtgaccgtgctggaaggtctgctgcgcctggcgcacccgattattcctttcatcaccgagaccatctggcagcgcgtgaaagtaatctgcggtatcaccgccgataccatcatgctgcagccgttcccgcagtacgaggcttctcaggttgatgaagcggcgctagccgacaccgaatggctgaagcaggcgatcgtcgccgtacgtaacatccgtgcggagatgaacatcgctccggggaaaccgctggaactgctgctgcgcggctgcagcaaagatgccgagcgtcgtgttaacgacaaccgcagcttcctgctgaacctggcgcgtctggaaagcatcaccgtgctgcctgccgatgataaaggtccggtttctgtgaccaagattatcgacggcgccgagctgctgatcccgatggcgggtcttatcgacaaagaagccgagctggcgcgtctggcaaaagaagtggcgaaagtcgaagcggaaatcggccgtatcgaaagcaagctgtccaacgaaggttttgtggcccgcgcgccggaagcggtaatcgctaaagagcgcgagaagctcgaaggctacgcggaagcgaaagcgaaactgattgaacagcaggcggtgatcgccgcgctgtaatcctcccgccccttatcccatccggtaaggggcgttattttatgaaagatcctcgcttgcactctccccgcccgcagtgttattaacaacatcatccgtcattattatgtaatgagtcttcaaatgaatacgagcgcaaccctaacgctatccctgcgccgcatcacggccactgataatccggcgattgccaatgttatccgccaggtctccgcggaatacggtctgaccgccgataaaggctatacggtcgctgacccgaatctggatgaactctatgagctctatagccaacctggctccgcttattgggtggttgagcaaaatggcgaagtggtcggcggcggcggcgtggcgccgctctcgtgtagcgagtccgatatctgtgagctacagaaaatgtactttatgtcctcggcgcgcggcaaagggctggcgaaaaagctggcgctgatggcgatggattacgcccgcgagcagggttttaaacgctgctatctggaaaccaccgcttttttgaaagaagcgattggcttgtatgagcatctcgggtttgagcatattgacgagccgctgggctgcaccggccacgtcgattgtgaagtgcggatgttgaaaacgctgtaacgcctcgctaccgtgggcctccccggtagcgctgcgcttaccggggctacaggggccgaataccgcgggctacggcgccgtcggtacgccgctgtggaagcggaactcgggctccgggcggaggatcaatgccgcttccgcctcgccaagctgacgtacgcgctcgctgatatctccccccgctatcttctgcgccaggtccaggtaatcctgataatgccgggcctcggagcgcagcaacgacagataaaacttctgtaaatcatcatccagccacggcgccagcgcggcaaatcgctcgcaggagcgcgcttcgatataagcgccgcaaatcagcttatcgattagcatcaccggctcatgggatcgcacctcccggcgcataccgcgggcatagttgctggcggtgattttgacgtaagggatatcccgcgccagcatgatctcacgcacctgccagaagtggtgcagctcctctttgataagcagaatcatgctgtcgagcaactggctgccccacgggtcgttggttcgcggcatggcgcttttgttgatccgtttatgcagagcgacaaaatccggctccggcccacggcgataggtaaagtcttcgtacggtttcaggcattccagtagctcgtcggcgccatctttatcggcgacgtagcggcgtaccagcagcatggcgttttgcgccgctttcagctcgcataccatatggtcggtcaacagcagcggcaggttgtccggtttacgggcttcgtcaatccactcctgcggcgttgggcagtgcaggaatgctaaaatcggggaaagtatttgcgggtaatccattgaagctccaggctataccctaatcaggacgggtatatacggcggcagacgccgccgtatccgttgacgacttagtggcgtacgccgttatcgtcttcgtcaattaaatcttcgtcatcttcgccgtcatcgtcttcgccgttcgggtcttcgtagtaggtaccccaaccgtcgtactcgacgttgaatttttccgccaggttcatcagctgttcaacctgggcgtcgatcagatcggcgttgagcgcgctttcgctcaggatatcgcagcagatcaccacttcgccttcttcgacttccagctcttccggctcggtgacttcataacccatcttgaaggcctctaccgccactttttccaacgtttcgaaatcgtcggcagagagatgatgctcaatggtatacagcgcgtccggatcgctgccatcttccagcagctcttcgataatcagacgcgtttcctcacgctgttcttccagtagttccgggtttgccatggctcgttcctcataatgtgcggcagatactcctattgtcacataccgccgtgattgcctccaccttctgtgtaaaagatttctaactcggggttgcaaatgaatattcatacatataaagtgaattttaattcaatagtggcatttgccaggtgagggaattatgtccgcgttatatcagaagcatttcttgagattactggattttactgctgcagaaattaccggccttgtcgacctggccgcgcaattaaaagccgataagaaaaacggtatcgaggcccagaaactgaagggcaaaaacatcgcgctcatcttcgaaaaagactcaacccgcacacgatgctctttcgaagttgccgcttacgaccagggcgcccgcgtgacctatctcggttccagcggaagccaaatcggccacaaagaatccatgaaagataccgcccgcgtgctgggtcgcatgtatgacggtattcagtatcgcggctacggccaggagctggtggaaaccctggcggaatatgccggcgtgccggtatggaacggcctgaccgatgaattccacccgacacagctactggccgacctgctgaccatgcaagagcacctgccgggtaaggcatttaatgaaatgacgctggtctacgccggcgacgcgcgtaacaacatgggtaattccatgctggaagccgccgcgctgaccgggctggacctgcgcctggtggcgccgaaagcctgctggccggaagagggtttagtggcggaatgcactgcgctggcgaaaaagcacggcggcaatattaccctgacggaagatatcgccgcgggcgtaaaaggcgccgatttcatttataccgacgtgtgggtatcgatgggcgaggcgaaagagaaatgggcggagcgtatcgccctgctgcgcggctatcaggtgaataaagccatgctgcaattaaccggcaacccgcaggtgaaattcctgcattgtctgcccgcgttccacgatgaccagaccattctcggcaaacagatggcggcggagtatggactgcacggcggtatggaagtgaccgatgaagtctttgaatccccagcgagcatcgtcttcgatcaggcggaaaaccgtatgcacaccatcaaagcggtgatggtggcgacgcttggaaaataaccattaatcacggtaggttcccggatagcgcgctacgcgtatccgggctaaccgttttaagccatcaacaccttcaccaccgctttgcgcaccttcgccggcgccccgaccgcacagagcggtttatgcacttcgcctggataaaacactacaaaatcgccctcgttaaggataacggttttctcctgcgcgccctcggcgaggaaggcgatgtctttgtccgccagccagtcagtctgcggctcgcctgccggtaaggtgctgaaggtcatcccttcctgaccgcgaagtacaatctggatatccagatagcgggcgtgatactcggcgcgacgctcggcctgcgcttcggtgctgtcttcagaaatcagatagaacagattattgccgtcgatgtcgtgcttgccgagcggcgtcgactcgctaacgtgggctttaacatgctcaatcgcctgacgcagcgcgtccggcagccaggattgcagatgatgaatattgccgataatcatagtagccctcaaatataaaacagcttttcatttttgttttatacgctgcttaccactaccagaccacatttttatcgcggttttttgcgctggcgcagccttcgcaggcaaacgtttccctaattgtggattaatcgcttgattgctcatcaaagctgcgtataatgccagccgttttgccgggaggaaatatggtcaattgcgtacgacattgctgtgtcttaccgcgtctgaaagcaggcgctggcctggcgtttttctttccgttgctcaatgaattctcgaagccccttatttaaggggctttttttttgctcaggcgtcaggagataagcatggctaacccgctatatcaaaaacatatcatttccataaacgatctcagccgcgaagacctcgaactggtgctggcgacagccgcaaaactgaaagccaatccgcaacccgagctgctgaagcataaggttatcgccagctgtttctttgaagcctccacccgtactcgcctctcttttgaaacctccatgcatcgcctcggcgccagcgtggtcggcttctccgacagcagcaacacctcgctcggtaagaaaggcgaaaccctggccgacaccatttcggttatcagcacctacgtcgatgctatcgtgatgcgccatccgcaagaaggcgccgcgcgtctggcaaccgaattctccggcggcgtgccgattctcaacgccggcgacggcgccaatcagcatccaacgcaaaccctgctcgacctgttcaccattcaggaaactcagggccgccttgagaacctcaatgtcgcgatggtcggcgacctgaaatatggccgtaccgtacactcgctgacccaggcgctggccaaattcaacggcaaccgcttttacttcatcgccccggacgcgctggcgatgccgcagtacattctcgatatgctggatgaaaaaggcatcgcctggagcctgcatagcgccatcgacgaagtgatggcagaggtcgatattctgtatatgactcgcgtgcagaaagagcgccttgacccatcggaatacgccaacgtgaaggcgcagttcgtgctgcgcgccgcggatctcgaaggcgcccgcgtcaacatgaaggtgctgcacccgctgccgcgcgttgatgaaatcaccaccgacgtcgataaaacgccgcacgcctggtacttccagcaggccggtaacggcatcttcgcccgccaggcgttactggcactggtattgaatagcgagctggcacaataagggggaatgagagatgacacacgacaataaactgcaagtagaagccattaaacgcgggaccgtgatcgaccatatcccggcccaggtcggcttcaagttgttgaccctgttcaagctgaccgaaaccgaccagcgcatcaccatcggcctgaacctgccgtccggcgagatgggccgtaaagatttgattaaaatcgagaacaccttcctgaccgatgagcaggtcaatcagctggcgctgtatgcgccggacgcaacggttaaccgtattgatgattacgaagtggtgggcaaatcccgcccgagcctgccggagcgcatcaatagcgtgctggtctgcccgaacagcaactgcatcagtcacgctgagccggtttcgtcgagtttcgcagtgaaaaaacgcgccgatgacatcgcactcaaatgcaaatactgtgaaaaagagttttcccattatgtggtgctggccaactaattgcggttggtattaataccggccctccctataatggctacgacctaattactgcagttcatctggagatattatgagcaaaactattgcgacggaaaaggcaccagcagctatcggcccatatgtacaaggtgttgatctgggtagcatgatcatcacttccggccagatcccagtagacccgaaaaccggcagcgtgccggaagatgtcgccgcgcaggcgcgtcagtccctggacaacgtaaaagctatcgttgaagccgctggcctgaaagtgggcgatatcgtgaaaaccaccgttttcgtgaaagatctgaacgatttcgccaccgtgaatgccgcgtatgaagcgttcttcaccgagcataacgccactttcccggcgcgttcctgcgtagaagtcgcgcgtctgccgaaagacgtgaagattgagattgaagctatcgcgatccgtcgctaagcgcttctctgccctcaccccaggcgcttgcgccatccgcggggtgagggaaatgccctattttatcttcgttgcccgcagcagtttctccagcggatagaccgccgcaatcaccagctcatcctgggttttcgccgccgtatccagctgcgcctggattgaggcgtactctttatcgtccagcgttccctgccgcgccaccagatcggtcaagcgcagcccgaggctcgccagcttatcaacctgctgcaccaccggtttaatcgccgccagctgatagttattgtcggtcagcgccagcgcatcgccgctgttgttctgccagcgggtaaagacgtggcgcagcgcatcggcgctctcagtatcctcggcatcgctgatcagccgctccgcccactggttcaggctgcgtacggtgtcactctcagccggtaacgcatcggccaaccggttaagcggttcaaattgatggtaattgttcgcctggaacttgagatgctgacgggtgtagtaatgcgccggctccagcgcctcggcgaggatctgcaacgccagcgtatggctgctgttcgccaggcgggtgaactgctccagctgctgagtgtgctgctgcaggccgacggagaccgttgaccaactgtccatcgcctgcaggcgctgatacatattgtcgctgtctttgacgtcttcggccgaccacagccgctccgccaccgcaaaagcccgaggccacagcttgatatcgatgaccggcgcggcgacgttttccgcccacagcgccgcctcgccgcccagcagattcttctgttgctgcgcgtcgggcagcgtcggctgaatgccctgcggtacggcatccagccgcttgccgtcaatgggataacgggtgttgccaagcaggaagtagcctgcgagcttgtcgtcgttaatggttagcaccgggcgggtctcgcccatccaggtatcgatgcggaacgtgacctgattgtcgccgagccattcaatctcctgcacggcacgccgtgatttccctttaaaatcaataaatccacgccagccactatcgccttttaccagcgtaaagctgccctcaaccgcgctgcccttcaggcgcggcatcgaaaactgccagctctgggcgctgtcgttatcggtaatcgtatccacaccgttaagcccctgcgggataatctcattacgatagtgataggcggtgtactgcggctggtcgaggtaaaaaccggtggagagaatgccgcgatagccgtgtttggcgacgtcgcctaatgcgtcctgcccctgccaggactgaatcagaatgctcttcggtaaatcagggtggtagatttcatcccagccgaccatctgccggtgatgtttttcgagtaacgtctccaggcgccggttgaagtacgcctgtagcgcgtggctgtccgccagccccttctctttgaggaatttctgaatggccggattggcgcgccactggctatcatcgacttcatcaccgccgatatgcagatacggatcggggaagatagccgccagttcgctgaccatcgcctcggcaaacgcgtaggtggcctcttttgttgggtcgagaaccggtttcagcacaccccagtggcgctccatcgcgtaaggccccggcgcgctcatcagctccggataagccacggcgatcgccgaggcgtggcccggcatatcgatttccggcaccacgcgaataccgcgttcggcggcatagcgcacaatgtctttcatctgcgcctgggtataaaacaggccgtcgctggcctgctgctgcagcttcggatagcggctggaggcgaagcgccagccctgatcgtcggtcagatgccagtgcagtacgttaagcttcgccgccgccataccatcaatctgccgcttgatcgccgacagcggcataaagtgacgggcggaatccagcagcagtccacgccacgggaagcgcggcgcatcgtcaatggcgacataaggaatggtggtgccgtcagggccgttttgtaccagctgtagcagcgtttccatgccgcgcagcgcgccaaaacgcgtattggctttcagggtcgcgccttcggcgttaacggttagctgatagctttcgtcgctatcaggctgcggcaggaaaggcactttcttattgacgatcacgttaatggttgggctttttgccggcgccgtctgcggctgtagcgtccagccggtttgccgcgcaacacgttcacgccagcggttggccgcctcgcccagatcgtcgccgctgacgttgatcgtcagctgattatttagcgccaacgccccctgcgcctgcgggcgctccacatgggcgggccacggcatcagcggcagatcgcctgccggagcggcaagcgccatgctgctcagtaatattccgctggtcagcagactgtaacgcacggtgttaatcatcaatgttcctttttatgacgggccaaaaaaagcaaaacattgggttaacatgcgcacaaaattgcgtcaatacatggcgatgacgggcttcacaacttgatgagatttaagagaaataccggtaagcccctctgccgaacggcaaaggggcgaaaccgctactgccagccgtagcggcggctgtagaagcctttaacggtctgggtcaacaccatgtaacccgccagaatcgccaccagccatgggaaatagctgagcggcagcgcctgcagctgcaggtagcccgccagcggcgagaacggcagcgcgatccccaccgccatcaccagcagcgtcatcgcgaacagcggccacgcggcgcggctctggacgaacggaatgcggcgggtacgaatcatatgcacaatcagcgtctgcgacagcagcccttcaatgaaccaaccggactggaacagggtctgcatctcgacgctgttggcgtggaacacccaccacatcaggccaaaggtgaggatatcgaaaatcgagctgatcggcccgaagaagaccataaaacgcccgagatcggccggattccagcgctgcggtttacggatctgctcatcgtcgacgttatcaaacggaatcgccacctgggagacatcgtacagcaggttctgaatcaacaggtgcagcggcagcatcggcaggaacggcaggaaggcgctggccaccagcacgctgaagacgttgccgaagttggagctggcggtcattttgatgtacttgagcatgttggcgaaggtgcggcggccttcgataaccccctcctccagtaccatcaggcttttttccagcagaatgatatccgccgcctcgcgggcgatatccaccgccccgtcaacggaaatgccaatatccgccgcgcgtagcgccggggcgtcgttaataccgtcacccataaagcccaccacgtgaccttcgcgtttcagcagcgtcacgatgcgctctttatgcagcggcgccaggcgcgcgaacagcgtggtgcgtttcgccagcgctgccagttcgtcgtcgctcatggcttcaatctggctgccaattaccacttcgcccgcatccagccccacttcatgacacactttcgccgccaccagttcgctgtcgccggtgaggatttttaccgtaatgccgctggcctttaacgctttcagcgccggggcggtggtctctttcggcggatcgaggaaggcgatgtagccttcgaggatcaggtcggactcatccgcacgctgatagtcgccttcccgcgccggcagatatttggtcgccaccgccaccacccgcagcccctgacggttcagggtatcggtcacccggcggatacggcgcagcatggtgtcgtccaacggtacgatttcaccgttgtagcgcacctgagttgagacgttgaggatctcctgcagcgcccctttacagatcagctgatgcgcgtcgtcctgctcttttaccaccaccgacatgcggcggcgttcgaagtcgaacgggatctcatccaccttctgccagcgctccgcgagaccgcgagcggcatccagctccacgccttccagcaccgcggtgtcgagcaggtttttcagcccggtctggtaatggctattgagccaggcggtgtgcaggactctctcgctggatttaccggaaacatcggtatggttctccagcacgattttatcctgggtcagggtgccggttttatcggtgcagaggatatccatcgcgccaaagttttgaatggcgtcgaggtgtttgacgatcactttttgttttgacagcttcaccgccccgcgcgccagcgtcgaggtgacgatcatcggcagcatctccggcgtcaggccgaccgccaccgacagcgcgaacagcgccgcttcccaccagtcgcctttggtgtagccgttgatcaacagcaccaccggcgccatcaccagcataaagcggatcagcagcatgctgacccggctgatgcctttctggaaggcgttcggctcgctttcctgctcgctgacgcgcccggcaagctggccgaaccaggtgttgccgccggtggcgtagacgatagcctgcgccgagccgctcaccacgttggtccccataaagcacagggtgtcgcattccagcggattggtttgtagcggatcgcgggtgcgcgcgactttttcaaccggcagcgattcgccggtcagcgaggcctgagcgacaaacaggtcgcgcgccacaatgatgcgcaggtccgccgggatcatatctcccgccgatagcctgacaatatcgcccggcaccagttggtcgatgggtagttcgagccagcggctctcgccctgttcgttgatgacccgcagcaccgtggcggtattgctgaccatcgccttcagcgcatccgccgctttggtcgagcgcgcttcctggatgaagttaagcagcgtcgagatgccgaccatcagcgcgataacgcccgcggcgaatagatcttcagtggaataggagacgatgccgagcaccgtcaacagcaggttgaacgggttgcgatagcaggtccacagatgaatccaccacggcgacggcttctgtgcggggatttggttatcgccgtgcagggcgattttcgccgccacttcggagtcgttcagcccttcagggtggctatcgaacgcgcgccagatctcctgctcatccatggccgccacgtccaggcagcgcttgccgagtgaatccgggatcggcgcgctggccagattgcgggcgtcgggcagcggatcgcgctggatcaaacgatgtggtaaatggcggctaagctgcgcgaacagctgccgggtaaaatttttcagcataaacagtccctccgcgctcgcgcgagcgaacgcagcgttgccaacaggcgcggcaaagccttacctgtcaggcattatttttatagggcagggacatcgtggacgtcactgctttacgctttccggtaaagcagtgctaaacaggcttaccggaaagaaaggttgctccatcgaggatgaggagtgggatcggggtccataaaattctccggtaagtgactcaagacggcgcggagtataccgcgaccaggaaactatttgtggctattatggctatcataccgcccggcaactaaaccagacatcaaccagtctttgctcattgaggattcgttgagtagcattagactcactcaaatcggacgacggcgagaacctcgtatgcaaaaccggctaacaatcaaagatatcgcccgcttaagcggcgtcggaaaatcgacggtgtcgcgcgtgctgaataacgaaagcggcgtcagcgagcgcacccgcgaacgggtggaagcggtgatgcagcagcacggtttctccccttcccgctccgcccgcgccatgcgtggtcagagcgataaggtggtggcgattatcgtcacgcgtctggattcgctgtcggaaaatttagcggtgcagaccatgctgcccgccttttatcagcagggctacgatccgatcatgatggagagccagttttctccggcgctggtggaagaacatctgggcatgctcgcccggcgcaatatcgacggcgtggtgctgttcggctttaccggtattagcgaggagatgcttgcgccgtggcgcgaaacgctggtgctgctggcgcgcgatgcccccggcttcgcttcggtgtgctatgacgatcatggcgcgatcgagttactgatgcagcgtctctatgagcgcggacaccggcatataagcttcctcggcgtgccgcacagcgacgtcaccaccggggaacgccgtcatcaggcgtatctcgatttctgcgcgcaaaagaagctcacgccaaccgctgccctgccggggctggcgatgaagcagggttatgaaagcgtcgccagcgtactgacgcccgagacccgcgcgctggtctgcgccaccgatactctcgctctcggcgccagtaaatatctacaggaacagcgtatcgacacgctacaactcgccagcgtcggcagcacgccgctgatgaagtttctgcatccagagatcctcaccgtcgatcccggctacgccgaagccgggcgccaggcggcacagcagctgatcgaccagatcgccggccatgccgaaccccgccaaatcgtcattcccgctgccctgaattaatctcgttcgggcgatttatgtgatcttcgccgagtttcgggaacgttcccattttgcattgccaacggaacggttaggatgcatgaaaggtaaaaacggcatctctcccctctgtttttgaggcttcatcatgagcaaagtaaaccagcaggacatcgataaactgatcgaactggtgggcgggcgcggcaacattgccaccgtcagccactgtattacccgtttgcgctttgtgctgaacgatccggccatcgccaaaccgaaagagattgagcagttgcgcatggtgaagggatgcttcactaacgccgggcagtttcaggtggtcatcggcaccgaagtcggcgattactataaggcgctgctggccaccaccggtcaggcgtccgccgacaaagagcaggccaaacaggccgcgcggcaaaatatgaagtggcatgaacggttgatctcgcactttgccgagatctttttcccgcttctgccggcgctgatcagcggcggtctgatcctcggtttccgtaacgtcatcggcgatctgccaatgagcaacggccagacgctggcgcaaatgcacccgtcgttgaaaacgatttatgacttcttgtggctgattggcgaggctatcttcttctatctgccggtggggatctgctggtcagcggtgaagaaaatgggcggcacgccgatcctcgggatcgtgcttggcgtcacgctggtctctccacagttgatgaacgcctacctgctcggccagcaggtgccggaagtgtggaacttcggcctgtttaccattgcgaaagtcggctatcaggcgcaggtgatcccggctctgctggcggggctggcgctgggctttatcgaaacacgtctcaagcgcatcgtgcctgactacctctacctggtggtggtgccggtgtgctcgttgattctggcggtgttcctcgctcacgcttttatcggcccgtttggtcgtctgattggcgacggcgtggccttcgcggtgcgccacttgttaaccggcagcttcgcgccgatcggcgccgcgctgttcggcttcctctatgcgccgctggtaataaccggcgtacatcagaccaccctcgctatcgatatgcagatgattcaaagcatgggcggcacgccggtatggccgctgattgcgctgtcgaatattgctcaggcgtcggcggtggtcggcattattattgccagccgtaaacagaatgaacgcgaaatctcggtacccgcggcgatctccgcctatctcggggtcaccgaaccggcgatgtacggcatcaacctgaagtaccgcttcccgatgctgtgcgcgatggtcggatccggcctcgcgggcctgctgtgcggcctgaacggcgtgctggcgaatggcatcggcgtcggcggcctgccgggcatcctgtcgattcagccaagctactggcaggtctacgccacggcgatggccatcgccgtggtagtgccgataatcctcaccaccgtggtttatcaacgcaagtaccgtcagggcaccttgcagattatctaacgtcttctttcggggcgccgcttgcgccccctatattcgcaggaacgtaatatgaatacccttccccgctggtggcaaaacggcgttatttatcaaatctacccgaagagttttcaggacaccaccggcagcggtaccggcgatttacgcggcgtcaccgcccgtctcgactacctgcaaaagctcggcgtcgacgctatctggctgacgccgttctacgtctcgccgcaggtggacaacggctatgacgtggcgaactataccgctatcgatccctcatacggcacgctggaggatttcgaccaactggtcgctggagcgaaagcgcgcggtatccgcatcgtgctggatatggtgtttaaccatacctcgacggaacacgaatggttccgccagtcgttaaataaggcgagcccgtaccgccagttctatatctggcgcgacggcgagccgggagcattgccgaataactggcgttcgaaattcggcggtaacgcctggcaatggcatgcggaaagcgaacagtattatttgcatcttttcgccaccgagcaggcggatctcaactgggaaaacccggcggtacgcgccgagctgaaaaaagtctgcgagttctgggccgatcgcggcgttgatggcctgcgcctcgatgtcatcaatcttatctccaaggagcaggacttcccctgcgataccgttggcgatggacgccgcttctacaccgatggcccacgggttcacgagttcctgcaggaaatgagccgcgatgtctttacccctcgtggcctgatgaccgtgggcgaaatgtcttccacttcacttgaacactgccaacagtacgctgcgctggacggccgcgaactgtcgatgacgtttaattttcatcacttaaaagtcgattatcccggcggtgaaaaatggaccctcgcccgtccggactacgtggcgctgaaagcgctattccgccactggcagcaagggatgcataaccgggcgtggaatgcgctgttctggtgtaatcacgatcagccgcgcatcgtgtcgcgcttcggcgacgagggcgagtaccgggtgccggcggcgaagatgctggcgatggtactgcacggcattcagggcacgccctatatctatcagggcgaagagattggcatgaccaacccgcatttcagcagcattagcgattatcgcgacgtggaaagccataacatgtttatcgagcgcgcggcgcagggacaaagcccggatgaactgctggcgattctggccagcaaatcgcgcgacaatagccgcacgccgatgccgtggcacgatggcgagaacggcggcttcagcgatggagaaccctggatcgcgttgggtaataactatcgcgagattaacgtcgaggcggcgctggcggatccggaatcggtgttttacacctatcagcagctgatcgcgctgcgaaaaaccacgccggtgctgacctggggggattatcaggatctgctgccggaccatccgtcgctgtggtgttatcgccgccagtggcaggggcagacgctggtggtggccgccaacctgagccgtgagttccagccgtggcagccgccggagatgtctggcgactggcgggcgctgattggcaactatgcggagacgtccaaccgcccggcggcaatgacgctgcggccgttcgaagcggtatggtggttgcaggcataaagcttttccccgatggcgctacgctcaccggggctaccggttcgtggggctggagattacgcgcggtcagcgtcaggaaggataacgctctcctgcggctgcgctgaggcgtgctcctctttggccttcagccgatcccaggcgcggaagaacggatagtaaatcaccagcgaaatagttaaattcacgacctgcagtatggtgccggaaatatggccgccggtcgccagatagccgctgatgaagatcggcgtagtgaacggcagcgcgattccggccggcggcgcaaccagcccggtcgccattgcggtataggacacgatcaccagcagcaccggcgttaaaataaacggcaggaagaagtacgggttcatcaccagcgggatgccgaacaccatcggctcgctgatgttaaacaacgctcccggcgcggcaattttccccagctgtttcatctgctgactacggctgcgcagcaacataaatatcaccagccccagcagcgcgccggtgccgccgggcgcaatccacagatcgtaaaattgctgggtaatgatatgcgggatcggctggccgttctgaaaggccgtcaggttctctgacatattcgacagccacaccggctggataaataccagcacaatcgcgtcgccgtgcaggcccagcgtccacaaaataccgatcactatcaccgaaataatcatccccggcagcgtaccgccgacgtgatgcatcggaataccgatcaaagtggcgatcatgctgttgatgtcgccgaacggcgaggcctcaaccgccaggcgcagcgccagcaccaccgccagaacacagaagccggggatcagggcgaggaacgatttcgccactgccggcggcacgccgtccggcatgcggataacgagattgcggctggcgaccaaacgataaatctccgtcgacagcagcgaaatgacaatagcgacaaacagcccctggctgccgaccatgctcaccgggatcacccctttaatcacctccgccgcgccgtgtaccggggtaaagagggtgttctgcgggatagtcatcacaaaggccaccagcgacatcgccccggagctcagcgggtcgatggtgcggtacttctccgccagccgataagcgatgccgaagctggaaatcagcgccataatgtcgtaggtcgctttcaccgggtacagcattttatcacgccagacctcgccaaacaggccgctcatcatgtcggcatagccggggatcggcaggtaggcgaaaatcaggaaaaacgagccaatcagcataaacggcatattcagaatgatgccatcgcgtaccgacaggacgtgcttttgcccggcgattttcagcgccgcgggcatgacgtaacgttcaatccagcttgtattcgacatggtgtgctcccgagggaaatagcggtcagttaaattgcgtcagccattgacggtttatcgttaacacttcatccagcagcgcctgggcatcggtgacgttaccgaccaacgggttagccaccagcgccaacagcgcgctctcgcggcagccgtgtaccgcggcttcaatcgtcagcctttcaaaggccttcacctgctgcgtcaggccgttcatcgccggcggcagcgggccgaacgccagcggccgtgccccttgcgcatcaataatgctgttggtttccaccaccgcatcatcatcaaggccgtgaatcgcgccgttgttgcgggtgtttaccaccatctccgcgcccaggttgttgtgaatcgcattgataagctcaacggccacttccgagtagtaagcgccgccgcgaaagctcagctgctctggtttttcttccagctgcgggtcggcgtacagcgtaaacagctcctgctcgaccttcatcacctgctcggcgcgggtgcctttggttttcgctgcggcgatctcttccgccagcatcgccggcgtcagccagaaataacgatgataagggcacggaatcgcctttagcgcgcggaggaattccgccggccacggcagttctttaatgttgttcatcgacagcgccttaccgtcgcagagcatatcgatcactttgccggtgacatcctcgcgcccctgtagcaccttatgcacccagaccatatggttgagcccggcaaagcgcaatttcacttcggactcctgggcgcctaacatcccgacgatcatgtgctgcatgttgatcggcacgttgcacaggccgatgatcttcgccgtgctgtagcggctgaccgcctcggtgacgatccccgccgggttggtaaagttaagaatgaacgcttccggcgccagctgttccactttgcgcgcaacttcgaggatcaccgggatcgtccgtagcgccttggcgaacccgccgacgccggtggtctcctggcccaatagatgatatttgagacccagccgttcatccgcggcgcgcgccgccagctgcccgacgcgtagctgcgtcagcacaaagctggcgccgcggatcgcctcatcgagcgtaaagtggacgctgaccgccacctgctccagccctttatgtttcaacatccgccgggccagcgcggcaatgatctcaaccttttccctgccggattcgacatccaccagcgccagttcggtgaccggaagctgttcataacgaacgataatcccttcaataagctccggcgtgtagctgctgccgccgccgataacggcgattttcagtgcttgcatagtgacctctattcgcattttcggcatgcagatcgccgcgcgcgatcgccaggaccgcacgtgagggtgataaaaatgggattagaaaattagcgttcgagcagggccagcgctttatccagcaccgctgcgccgcgcatcatgccgtagtcggccatatcgatcaccgccaccgctttaccctgcggcgccgccagcgcggtcaggcggccggcttcgtatttgacctgcggcccgagcagaatgacgtcggcgttcggcagttcgcgttcaaattccgccaccgctacggcatagatttccagcgccagcgcgcgctgctgggcttccgctttcattttgttcaccagcatgctggtcgacatgcctgcggcacaacagagtacgattcgtggcattgcgcttcccctttgcgtgtttatcgcttcagccttcacgacctatgcgactatattgttaatattgtgtgatagtgaaggctatatgaaaataattttcaccgatgtgatcgaggctcaatttttgcgcattatttcctcatgccattgcgaaacatcgacgccagacataggaaatattctgcgcaggtgctataaaaacggctattcactaagtgaaaaatattttcaattccgggtactgccaaagggaacatcaggatggatatcgtaggtcaactacaggacggattggtccgctttagcgctcaggagtcgcgcgtcgccgcctttattctggaaaatcttagctttaccgccagcgcctcgattgacgaactggccgccagcgcgggggtcagcccggccaccatcacccgcttcgcccgttcagtgggctgtgatgatattcgtgatttacgcaaacagctggcgcaggccagcgaacggcgcgccagctggctcacgccggatagcgccgccctgcccgtcgcctggcgcgacaaacttagcagcctcggcgatacgctaacccgtcagctcggccacaccgccgaagcggcggtggagaagtgcaaatcgcgcctgctgagcgcccgcgcggtgcattgcttcgccctcggcgcccaggacgtggcgctggcggcgctgcttcagcaccagttgctgccatccggtatcgcgattaatctctgccaggatgcggcgctgatgcgaatgactgccagtacccttaatgacgatcacctgctgctggtgctggccaccgccgatgccaatgccgtattacaaagcgcgacgctgcaggcgcgtacgcaaggggtgacgattatcgctctgagcccggaacagcacgcgctggcggatatggccagcgccgtgcttcccctgcccgtcaacccgcagcatgcccgctacgccctgctgctgcttgtcgatctgcttaacgatacattgattgcctgaatattctgcccgttcccttcgcgatcgggccccatttttgcttatattttaagcgcctaaatttacatttcacgctagcgcccatcatccgtactctcacctttttaccttgttctgggtcaataaaatcgcaaacatctttgatgcaaatcactacatatagaacttaaaatgcgcctcagccctacatattgtattaatcgtctattatgtcaccatatcttgtcgttgttgggcggtgatgagatgtggataaaaagggccggatccgaaggcaaacgccgctagtcgtagcgtggcgcgcttttgggagaccttccgcctctgtggataacctgttctatatatggagtgatcatgacaccgcatgtgatgaaacgtgatggctgtaaagtgccgttcaagtcagagcgcattaaagaagcaattctgcgtgcagctaaagcagcgggagtcgatgacgcagactattgcgccaccgtcgcagaagtcgttagccagcaaatgcagggccgcgcgcaggtcgatatcaacgacatccagaccgccgtggaaaaccagttgatgtccggcccgtggaaacagctggcgcgcgcctatatcgaatatcgccacgatcgcgatatcgagcgtgaaaagcgcggccgtctgaaccaggaaattcgtggtctggtcgagcaaaccaactcatcgctgctcaacgagaacgccaacaaagacagtaaagtgatcccgacccagcgcgatctgctggccggtatcgtggccaaacactatgcccgtcagcacctgctgcctcgcgatgtggtgcaggcgcacgagcgcggcgagatccactaccacgatctcgactattcgccgttcttcccgatgttcaactgcatgctgatcgacctgaaaggcatgctgactcacggctttaaaatgggcaatgccgaaattgagccgccgaagtctatctctaccgccaccgcggtcacggcgcagattatcgcccaggtcgccagccatatttacggcggcaccaccattaaccgtatcgatgaagtgctggcgccgttcgtcaccgagagcttcaaaaagcatcgtaaaattgccgaagagtggcagatcccggatgccgaaggctatgcccgtacgcggaccgaaaaagagtgctacgacgcgttccagtcgctggagtatgaggtcaacacgctgcataccgccaacggccagacgccgttcgtcacctttggttttggcctcggcaccagctgggagtcgcgcctgatccagcagtcgattctgcgcaaccgcatcgccggcctcggcaaaaaccgcaaaacggcggtattcccgaaactggtcttcgccattcgcgacggcctgaaccataagttcggcgatgcgaactatgacatcaaacagctggccttagagtgcgccagcaagcgcatgtacccggatattctcaactacgatcaggtagtgaaagtcaccgggtcgtttaaaacgccgatgggctgccgcagtttcctcggcgtgtgggaaaacgagaacggcgaacaggtacacgatgggcgcaacaacctcggcgttatcagcctgaacctgccacgtatcgcgctggaagcgaaaggcgacgaagccgccttctgggcgctgctggacgaacgcctgctgctggcgcgcaaagcgctgatgacccgtatcgcccgtctggaaggggtgaaagcccgcgtcgcgccaattctgtatatggaaggcgcctgcggcgtgcgtctgaaagccgacgatgacgtcgcggaaattttcaagaatggccgcgcgtccatttccctgggctacatcgggattcacgagaccatcaacgcgctgtacaacaatcagcatatgtacgatagcgaagcgctgcgtgaaaaaggcatcgccatcgttcagcgtctgcgcgacgccgttgaacaatggaaggaagagaccggctacggcttcagcctgtacagcacgccgagcgaaaacctgtgcgatcgcttctgccgcctcgataccgccgaattcggcgtggtaccgggcgtgaccgaaaaaggctactacaccaatagcttccatctcgacgtcgagaagaaggttaacccgtacgacaagatcgattttgaagcgccgtatccgccgctggccaacggcggcttcatttgctacggcgaatatccgaatatccagcataacctcaaggcgctggaagacgtgtgggattacagctatcagcacgtaccgtattacggcaccaatacgccgatcgatgaatgctacgagtgcggatataccggcgagttcgagtgcaccagcaagggctttacctgcccgaaatgcggcaatcacgacgccgcccgcgtatcggtgacccgccgggtatgcggttatctcggcagcccggacgcgcgtccgttcaacgccggcaagcaggaagaagtgaagcgccgcgtgaagcacctgggcaatgggcagattggttaaagatcaatgcgcttttcccggatagcggcgcgcggcgccttatccgggctaccactgccactgtcgtagcccggccgagctcagcgacgccgggaaatggccgcactccttcgttttcgcaaagcaattaacgtcagagcaaggcggcaaacgaaggaatccccaggagcgtacattcagtacgtgactggggtgagtgagcgcagccaacgccgctatggcgttaattgagaagcgaaaatgaattatcaccagtattaccccgtcgacatcgtcaacggccccggcacccgctgcaccctgtttgtctccggctgcgtccacgagtgccccggctgctacaacaaaagcacctggcgggtaaattccggtatgccgttcacaaccgggatggccgaccgcatcattgccgacctcaacgatacccgcattaaacgccaggggctttcactctccggcggcgatccgctgcatccgcaaaacgtcgcggagatcctcaatctggtgcagcgcgtacgcgccgaatgccccggtaaagatatctgggtctggacgggctataagattgacgaactgaacgccgagcagatggaagtcgtgaacctgattaacgtgctggtcgacggtaagtttgtgcaggatttaaaagacccggcgcttatctggcgcggcagcagcaaccaggtcgtgcatcatttgcgttaatcccctccgtcagcctctcaaaaccggctgacgcactccatcgccaccgttttaaactcatcgaagctacgggtcgcggcaaggcggctcatggcgcgctcgcgcaggaaagtcacgaaaatatcgtagatcgccatcgcctcttcatactcgctcttgctgatagcgagcaggaagatgatatgggcggtttcgtcgccccaggcgataccctgcggggcgatcacggtatagaccaccgtctttttcgctaacaggccgagggcgtgcggcagcgcaataccgtcgcccagcatggtgctgacaatcgcttcacgctcgaccaccgaatcatgaaactccgcatcgacgaagccttcctgctgcagctgctgacacagctcggcgaacagcgtttgctgatctatcggcttatcgatcacccggaagtgggcggcatcgaagtatttattcaacatccacggacgggtgcgatccaccagcaccagcttgccaatctgatctaactggtaatcggtggggaacggcgcgatggtcaccaccggtttgtctttttcgccgatccgtaccgttgagatgacaaaatcctcatcgatcgcctcccgctgctcatattcacgctgggaaatggtagcggcgatcgccaactgcggatatttacgctgcaggatcgcttcgatcatccgcaccatcgcattactggtatcgcacaccagcagtacgtgcggctggcgctggtagccgatgttgtagtggcgttccagcccgacgccaatatgcagcaccagaaagccgatttcgttttcgctgatggtataaggcgtgtatttgccccagctcgataccgcggcgagtgtcatatcccatgccatcggatagtgctgtttgatgttatcgagcagcggattggggatcattatctgatagcgcacgcgggtgatcatggttttaatgtgggtcagcagatcggcgtgcagctgggcgtcgtccagcaggttgtagttatactgactgttgatgtaacgcagaatgtaattgaccagcgcttcgtcatcgtcggcgctgatggtttcgggatcaacatcctgtacctgacgggcggcgatatgcacgcacagccactcttcctcggcgggcgagaagggttttccggccaaccgctgtagctcccccgccaaatcgcgcgccgcgtcgcggacgttttgcgccacatcttcggcgctaaaatcggccagcgggtagccttcactcacgcggcgtaccacaaccgcgccgtacaggcagataaagcgctcgccgacatcggtgaggcgaatatgatgccgggtgagcgtctcctgcagcaccggttccagttgcgcaggaacatccgcttccagcgcctcggcgctaatcagcggattaatgccgccctgcagcgtcagctcccacagtaaatcggtcaggcaggcgcgaatcgatacctcgctgccgaacagcttcatgccgtggcgcgggcgggtttcaagagtcaactgataacgctggaagcgctcgcgcacctcgaccatatcattttgcagcgtggcgcggctgacgaaccactcatcggccagatcttccagcttgatggagaacgccgaggtcaggaaacgcaccagcaaaaagtggatgcgctcctgggcggtacgcggcacgtgctgcgtcttcggcgccgtctcctccagcgcctgaaaacgcgatcggtcgtcaatcttcagttgataaccgctaccgcggttgagcgtaaactgcgcgccatactgcgccaacagcgcattcagcgcggagatatcggcgcgcacggtacgggtagaaaccgacagccgctgcgccagttcatcctgcggcagcgtttcatttcgcagcagggtgaagagttgcgctaagcgttggttgggaaatcgcatgtcagttccttgttgttacggctcagggttgggcggatatcaccatctgcgatgggctaccgaccggcgtgtagtctggggcaaaggttaatttgccatccttcggcgccacgctaaaacgggtaatattatcgctacgctggttcatgacgtacagccactgcccctgattatccagcgtcagcgtacgggggtaatccccacgggtccagatatcctcctggtggctcaggctgccgtcagccagcacgctaaagtgggcaatgctgttatgcaggcggttggcgacatatagctgtttgccatcgttgctcaacaccaggcccgcggcaaagctggtgcccttatactcttttggcagcgcggagacggttttgccttcgcgcagcaggccgctttgcttatcaagatgatagaaggtcagcgtcgacgcttcttcgttaatcagccacagaccgtcgccctttggcgtaaagacgaagtggcgcgggccggctcccggcgatgaggcggcgataaacggcggatcgttcggcgtcagcttaccgctggcgctatccagccggtactgatagatccgatccagcccgagatcggtggagtaaacaaacttcccactgggatccgcggcgatcatatgggcgtgagggccattgtgatcgctaatggcaaagctgccctcgacggccgccgccggacgttcggcgccggccggaccttcatcctgatgcacatccaccgcctcgcccaggctaccatcttctttcaccggtagcacggcggtgctgccgctaacatagttggccaccaacagatatttaccatccggcgtcagggagagatacaccggcccggcgccgccggaggcaacctggttgagttccgtcagctcgccgttcttgtcaattcgccacgcctgcaccacgcctttttcgacttcactggcggcatacagcgttttgccatcgcgcgatacggttaactgcgcgacgttcggcaacgagctcaccagcgccttatcgcgcagagcgccggttttggcatcgacggtaaagcgatacagaccttcgccattaggattataggtaccaatccaggcgtagtgggtttgcgcggcggcgccggcggcaagcaaagacagtgaagcaacaagcaggtgacgagcggttggcatggtaactccttgatggttcggtgggataagttgcccctcaccctttgagggtgaggggcaagagcactacttcactaactgtttggtcatctccagcaactggcgcacatcggccgggcgggtgttgccgctggctttatcgataatcgagctgtaaatatgcgggatgattttactcacgccggcatccagcgcgattttcaggatctcgctgtagttttccagatcgataccgccggtcggttccagccagaaatcgtgcgcggcgcaggctttggcgacggcttcaaactcggcgcggtgcttcaggccgcccatcgggaagtatttgattgagctgccgcccatatcttttaacagcgcgatggcggtttccagcggaacaatcccatccgccgcgccgctgctcagcgggccggttgagatcttcaccattcccggcgtgccggtcggcgagaccaggccattcaccacggtctcattctgcccgagcagcgcgcggctggtagccacgccggtgaagacctggttgacgtgctgcggctgcacctggcgagaaatctcgctcaccatcgccgactggtttggatcgcctgcgcccagcccgacggagagcgcgttatcaatcagcttcgcgtattcacgcatatcggccaccgcgctggcgacgtccggatagtttttggagagcacgccgaccagtacgtgaccttccgccgcctcgtaaatttcacgggcgttgtctttgctgcccgccagtacgttcaggcacacgcggtcacggtaaaagtttggggtcagtttcatgcttttttctccttattcagaacttctgcgatgcggcgagcaaccacctccagctgctgcgcgttcacgctgcggacatcggcttcgataatgccttcattcgctttatagccgcggaagtaaatggcgtattcgccctgcttcagggcgttaaccagatcgccggtattcacgccggtggtcgcttcatcaaatttaatttcggcgcgggcgatatcacggcccgcgctatcccacaccacccgcgcggtcacgccgttaagagtgttgagctgttcgataaacggcgtcatcttgtccaccatctgctggccgctctctttggtcgccgtcaggtagtgttcaatcgcgcaggtcaggccaagaatgccctctttacccactttcatcgcccggccaatccccatcgactggcgcttaacccactcgacgtactgcgttttgccgatgaccagcccgctggtcggcccttcaatcgctttcgcgccgctgtagataaccaggtcggcgcccatgcggtagtagcactgcaaatcttcttccgccgccgcatcgacgatcagcggcaagttatgctggcgcgccacttccgcggcctgcgcgacgttaagcatgcttttttgcacacagtggtgggatttgatgtacagaatcgccgcggtgcgcggagtgatcgccgccgccagctgttgggcagaacattcgttggcgtagcccgcttccaccagcttaccgccgcccagcgccaccatggtgccaaccggcgcgccgaagttgacgttgtggcccttcggcagcactatttcgttattttcaatcggggtaacgtgcaggttttccagcagccagtcgctgtctttcaccagcaccgccgcgaccgactgggcaatccccgccgacgcgcaggagacaacggtcgccccttccacatccagcagtttggcgatgtactcgccggttttattcaccaggtctttcatttcaaagtactggttcataccggccatcgcggcttcaaccacttccgggcgcggcgtggaaacgcccagcgccgtcattcggccagaagtgttaataacttgttttaaatggtatttctcaaaaatcgaaggcatgttccgcgctcccttgttcggtcagatagcccttgcccgcgcgaatcgcggccagcggcaccagaatgttgtcagcctgcaggctctctttttcggcatctaccagcaacgtcggctgatgctgcaggctaaatagcgttaaatcggcatcgaagccctcttcgaggcgccctttacgcgtcagacgcagcccctcggcggcgctgacggtcacgcagtcaatgacctgcggcagggtcatgccgatggcgaggaatttcgacatcaccagcgccagcgagcgcaccgggccgtcgatacggttacggcagtaaatatcggagctaatggtgtgcggcagaatgcccatcgcaatcgcccgccgcgccacttcaaagctgaaactggcggtaccgtggccgacatcgaggcgcacgccgcgctgcagagcgcgagtaatggagctgcgcagctcgccggcaggattaagaatacggttcggcttgccgttatagcagtgggtaatgatgtcgccgctgctcagcagatcggcgatttcatcgaggttcggcgggttattgccgatgtgcaccatcagcggcagatcgccgttttcctgctgaatggctttggcgcgcgccagcggcgtaatgccgttttcgccgacgacgctgctgctcatccgcgccttcaggccgacgataaaatcaggatgacgttgcaccgcctgcttcaccgcggcggcgtcgatattagccatattcgccagctcattctgcgcaatcagcccgacgcgggagatgttgagcaacgcataaacttccgtcgccgctttacgggtcagttgatagaagtcatcaacgtcgtcggcgccagtgctgccggcatcaatcacggtggtgacgccggtggcgatgccgacgctatccggctcatcgtgataaatcggtgaattcgggtagcagtgaacgtgagagtcaatccagccagcgctgacgtaaaccttgccgttcagctcgatggttttacgggagggcgcgctaatctcgcccagcgccgcgattttcccgtcctggatggcgatatcagtcagggtatcgtcgacgaggcgcgcacggcgcaggagtaaatcaaacatagctatctcctgatgaaagagtgaatctgttgccggatggcggcgtaccgccttatccggcctacaaatcgctctgacttgcaggcccgataagcgcggcgccatcgggcgattagctaatcgcaatcgggaagatggaaccgaggatcatcgcgccgaggatggcgccgccggtgatcggtttctgccagatgtagaacagcagtgcgccaaccaaagaaccaattccgataggaatagacgccgtcatcgcactgaggatgatcaagggaccgaggaagcggccggaggcgttaccggcccccatcatcacgtcggcgccgtaggtggagtcgctctggttgatggtgaacttacgcgccagaatgatgatgtagccgactgccaggccgaggatcaggccggttgccagcgacgcggcgaagttcgccaccgggaagacaaagcccgcgccgagcagcagcgccggtacgccgaggccgataccggtctgaatggcgccgccgatatccagaatccccaccagcgaaccttcgatgatgcgggcgaacaggaagcttgcgccgaatgccgccaccgcgccgtacgcgccggtatcaatccctgccttcaacatcgccacgaaggccacttcgttaaaggcgccgatgccgtacagatagtacatgtgcgtcccggcgaagacgccggaggagagcaggccaacaaagatcgggaacgaccagtcggcataccaaaaacctttattctgttccattatcaggctcccgttacttgccgctgagtgagttgtggatcatgtccagccagttcggcacggtcagatggaaggattcgagcatcttcatgtcgaagccgcggaagaagccgctgaggacgaacaacgcgacaatggcaatcatcatcactttggttacccggttccagccgctctcttctacgcctttaccgatcaggatccccagtaccagacccggtacggcgttccccataatcagctgcgccgcgccgccgaaaatcgtcgcccagaagcctgatttcttaccggcatcgatagccgccagccagaaaatcaccggcatcacggtgttcaccagcaggtttgccgccggaaccaataccttaacggcggtgacctgcagcgcttccggtacggaagaggcggtcaggttaaggaaggcgacgacgatcatgccgatgatgccgcaggcaatggccatttttttcggatcgtgtagcgtttcgccaacgttacgatttttcaccatcaacgccgccgcgccccagttcgggataatgcggtggtcaacgtcctgggtgaaggagcctgctgcaacggaagaggcccaggcgttaaagaagaagccgagaccaaaagagaagtgagaagccggatcgccttcgcaggaattcagctcgcccaaggtacgaaacgcccccatcccttgcgtggtgggcgcgtgaaacatgcgtgccgctccggcgcccacgccgacgccgaccaggccgccgatgatgagcgattttattaaaattatcaggaacatagtctgaccctttggtaacaatcaggtttgcgtgacgaaatccactttatcgagatcgatggcggtcacgttgacggtgacgtccagctccacgctgtaggtccgtcgttcacggcgcaaaaagatgaacagaaacgcctcttttcgtaccgcttcgcgcgcatgaacaaccgtcacgtcctgtggctcaatacgcagtaggatgcgcgatgatgatttcatcaccgcagcctgcacatggttcagggcatcggcgaaggcccgtgatttgctttcgcctttgcctgcaaccctcaccgtggtggtgaattgctctttcatacttatgcgccgtatttctttttccaggcttcaaccaggcgctcgcccagctcttctttatccatgaagccgaagcccagcacgttgcaaccttcgttgatggcggtgacgccctcttcaatagaacgcatgccgtattttgctttgtaaccgtacttggtctgtgcggtgatggcgcctgcgccgccgctaccgcagaaggagatgccgaaagaggcgttttccgctttcatcatgtcgccaagtttcatatctgcagcaacgccagggacgaccactgcacgtgcgccggctttttctgcgcctgccgcgactttttgtcctttacccagacggtcgccaataactacggtgatttgttccatgttttgctccttacaggttttcttttgcgacttcgaagtggacggacaacaaccaggcctcttcatcaggcaggttgccgaactgtgcgaccacttcgcgggccagcatcattgaatcttcagaaatttcttcgaacagactggcatccacttccggtagcggttcgccgctgattgaccggtgggccatggcccgcacgtgggaagtcagcatttgctcctgaacgtcgttagggacgatgtcgtgacggcttaacagggcgaatacctgctgtaacatcttgtcagccaggcgttcggtctgcgccgcctgctcccctacgtcgtttattaccgctccgttattcacttgtgttaccccgctgatgtctctggaatccaaagtagcgccgggggtcaggagtttgtagcgagttgttttccacttcgaagtggaaagggagaaggcttaggtgatcgactccacatattcgccggataaatgtaaaaacaggtgatatgacgtgatgcgcatcacaacaatgagcgaggtttagcggaaaacgaccgcagaaagaccggaaaaagaaaagggaaaaatgtgatacaggtaggcttttaggcgggagacatcggctgacgcctcccgaaaatggcgattagcgatacttcttatggtaagtattgcgggtagttttgaagtcctccgcggcagcctgcgcctctttcagcttaccagcgtcagctaacttcagcgcgccgtcgatctggccgaccagcgtttccagaccgtggcggaaatctttcatctccgggctatcggccgctttgccttccagttttggcggcgtctctttctgcgcgtcaaccgcagcggtgcgcatcttattcagcgccgctttcagctcgccaatgtcagaggttttttgtaccacctgcaggttttccgcaagggtgtccatgtcttcgccaagatcggcgaacgccgatgccgaaccgagcgcaaaagcagagacggccagcatcgctaacagttttttacgcattgctcacttcctttttattatgaagatatcaaacgggcgcggcaggacgcgcccggcacacaggtcattgaccggcgattttcatctccggcagcagcacggaaccacactgaatattgctgcgcgtttcgatatcgtcgccgacggtgacaatattacgccacatttctttcagatttccggcgatggtgatctcactgaccggatactgaatctcgccgttttctacccagaaaccggatgcgccgcgcgagtagtcgccggtcacgccactaacaccctgccccatcaattcggtgaccacaagcccggtgcccatctctttaagcatctttgcaaaactcaggccgcggccgttgatgcgccagttatggataccgccggcgtggccggtgcttttcatacccagcttgcgcgcggagtagttagtcagcagccactgggtcagcacgccgtctttgatgatgtcgcgacgttcggtgcgcacgccttcgctgtcgaacggcgtggaggccagccccttcagcagatgcgggtgttcttcgatggtcagccactccggcaggatctgtttgccgagggagtcgagcaggaaggtcgatttacggtagaccgcgccgccggcaatcgccccgaccagatggccaaacagcccggtggccacttcgttggcgaagataaccggcgctttcatcgtcgacagtttacgcggcgccaggcgcgacaaagtgcgacgggcgcattcgttgccgacccactccggggtctgtaagtcgccgatagcgcggccaatggtgtaggcatagtcgcgttccatatcgccgttttcttcggcaatcacgcagctggagagcgagtggcgggtagagcagtagctctggagcatgccgtagctgttaccgaaaactttaattccatagtggctgttgaagctgccgccttcggtattggtaatgcgtttgtcggcctgcagggcggcctgctcggcgcgggcggccagctcgatggcttcatccggagagacctccgccggatggaacaggtccagatccggggcgtcaaaggccagcagttctttatccgccacgccggcaaacgggtccggcgaggtgtaacgcgcgatatccagcgccgcctgcacggtacgggcgatagcgtccgggctcaggtcggtcgacgaggcgctgcctttacggttttgatgataaacggtgatgcccagcgcgccgtcgctattgaattcaacattctccacctcaccgtagcgggtgctgacgccgatgccggtggtcttgctgacggagacttccgcaccgtcggatttgcctgccgccagttccagtgccgtactaacggcttcttccagcgtcttacgctgctgtgcaacttgagagatgactttcattgctaatgccataatgtaagaaggagttaactgaagtctaacagagaaccgtttttcagtgcgcgccttaactggtaacattagcctcttttttaaggagcctgagatgacaaagcagcccgaagactggctcgacgacgtgcccggtgatgacgttgaagatgaagatgatgaaattatctgggtcagcaagagtgaaattaagcgcgatgcggaagaactgaagcgtcttggcgcggaaatggtagaccttggtaagaacgcgctggataagctgccgctcgataccgacctgcgcgacgccattgaactcgcccagcgtatcaagaaagaaggccgccgccgccagctgcagctgattggtaaaatgctgcgtaaccgcgacgtcgatccgattcgccaggcgctggataagctgaagaaccgtcacaaccagcaggttgcgctgttccataagctggaacaaatccgcgatcgcctgattgataatggcgatgatgcggtcgtagaagtactgaacctgtggccagacgctgaccgtcagcagctgcgctcactgatccgcaatgccaagaaagagaaagaaggcaacaagccgccgaaatccgcgcgcctgatcttccagtatctgcgcgaactggccgaaaacgaaggctagtccccacgctaaccgccatctcccggatggcggcgcgttgcgccttatccgggctaccccatcacctctcgccctaaatcgcgggcaaactgctgatactgcgccgcatcgatcggctgcggatagctcaacaccagcagttcatgatcgtcgatcccttgatgataggtcggatggcggtgcgcccaggcattggcatggaatcccatcgactgataaaaacgcagccgtttatgggcgatttcgctggtgagcggatcgatttccagaatggtcagcggcgcgcgcgtcaggatctgcgccagcagctgtttgccataaccgcgcgaacgcagggtgtcgtcaatcgccagatgttcgatatagctataaccggcaaactgccagcagccgctcaggccaataaatcccccgtcatcaaaccacgcttccaacgcatagtgcgggttgctcagcgcctgaagtttggcgtcgctttcgcgctgttcgtgccacggaaaggcgcgggcgtacagcgcgtcaagcgtggcgaaatggggcgagtcggtagaaagtactctttcacaggtcagcatcacacaatccctggtggcaaaaacaaaactgccctcacgcggagggcagtaaccggaggcgttcgcgcttattctgccgcgaccgctttttgcgccagtttatccagcagcttctgatgaatgccgccgaagccgccgttgctcatcaccagaatatggtcacccggatgcgcggttttcacgatcatgtccaccagcgtatcgacgtcggcgctccagtgcgccggctgtacgcaggcttccgccacttccgccacctgccacgggatatgctgcggctgtaacaggaagacttcatcggcgcggccgagagacggcgccagatcgtctttgcagacacccattttcatggtgttggaacgcggctccagcaccgccagaatacgcgcggtgccgccgactttgccgcgcagcgcctgcagcgtcgcgagaatggccgtcggatggtgggcaaaatcgtcgtaaacggtcacgccgttggcttcgccgcgtagctcaaggcgacgtcgggcgttgataaagctgcccagcgcgttagcggcatccgccggcaccacgccgacatgacgcgccgcggcaatcgccatcaggccgttgtgcatattatgctcgccgaccagcgcccagttcacttcgccaactttttcgccgtcgagcaggacttcccactgcgaggcatcggcgttgagtttcttcgcctgccagtggccctgttcgcccaccagctcctgttcgctccagcagcccatcgccatcacctgcttcaggttgatgtcgctctccggcaaaataattttgcctttgcccggcacgatgcgcaccaggtggtggaactgtttctgaatcgctttcaggtcgtcaaagatatccgcatggtcaaactcaaggttattgaggatcagcgtgcgcgggcagtagtgaacgaacttggaacgcttgtcgaagaaggcgcagtcatattcatcggcttcaatcacgaagaacgggctgtcgcccaggcgtgcggaaacatcgaagttccccggtacgccgccgataacgaagcccggcttatagccgcaggcttcgaggatccacgtcgccatgccggcggtggtagttttaccgtgggtaccggcgacggccagcacccagcggtcgcgcagaacgaagtcgtgcagccactgcgggccggacatgtacggaatgttgttttccagtaccgcttcgacgcacggattaccgcgggtcatagcgttgccgataatcaccagatccggctgcgggtccagttggctggcgtcgtacccctgaatcagatcgatgccctgattttccagcagggtgctcattggcggataaacattagcatccgagccggttacttgatgcccgagggaacgtgccagcattgccagcccccccataaacgtgccacagattcctaaaatatgaatgcgcattcgttacttccctcattaatctgacccgcattttacccatatgtaggccccctgagaaatgcatttcaggtaaatctgcatttgctggcgcgattcacctgtgcgcagtttttttattatttgttaagattgttgcgttcgttttactcaacataaaaatgcagggaacgagttatgaaaacgttaggtgaatttattgtcgaaaagcagcacgagttctcccacgctaccggtgagctgactgctttgttgtcggcaataaaactgggcgccaagatcatccaccgcgatatcaataaggccggtctggtcgatatcctgggtgccagcggtgcggaaaacgttcagggtgaagttcagcagaagctggacctgttcgcgaatgaaaaattaaaagctgcactgcgcgcacgtgatatcgtcgccggtatcgcctcggaagaagaagatgaaatcgtggtcttcgaagggtgcgaacacgccaaatacgttgtgctgatggatccgctggatggctcctccaacattgacgttaacgtctccgtggggactatcttctctatctaccgccgcgtcacgccggtcggtacgccggtcaccgaagaagacttcctgcagccgggtaacaaacaggttgccgcgggttatgtggtttacggctcctccaccatgctggtctacaccaccggctgcggcgtgcacgcctttacctacgacccgtcactcggcgtcttctgtctgagccaggagcggatgcgcttcccggagaaaggcaaaacctactctatcaacgaaggtaactacatcaagttcccgatgggcgtgaagaagtacatcaagtactgtcaggaagaagataaagagacccagcgcccgtacacctcgcgctatatcggttctctggtggccgacttccaccgtaacctgctgaaaggcggcatctacctgtatccgagcaccgccagccacccgcaagggaaactgcgtttattgtacgaatgcaacccgatggcgatgctggcggaacaggcgggcggcaaagccagcgatggtaaagagcgtattctcgatatcatcccggaaagcctgcaccagcgccgttcgttcttcgtcggcaacgaccacatggtagaagacgtcgagaacttcattaaagagttcccggacgcttaatttctaccttcccttcccgccctgcgggaagggagttccctgtcagcgattcaccgccccccccacgcgagtcaccgccgcattctggcgattttcccacagcaccgtcagcccgcgctgcagcgcaatgaagataaacagcaggatgccgatggcaatcttcgtccaccatgaactgagcgtaccgtcaaagttgatgtaggtctgaataagcccctgaatcgccacgccgaacagcgtccccaggaccgttccgacgccaccgctaagcagcgtgccgcctatcaccaccgaagcgatagcatccagttccacgccgacgcccgccagcgcgtagcccgcctgggtgtagatagagaagacgatgccggcaagcgtcgccagaccggtcgacaacatatagatgcgaatggtggtgctacgcgtcgaaatgcccatcaaattggccgacgtggcgttgccgccgatagcgtagacctggttgccaaagcgggtacgatgggcgaggaaaattcccagcactaccaccagcagcatcagcagccccatcgcgctcaggcggccgccgccggggatggtccacgccagcccggacagagtgtcatacagcggatggttaataggaatcgactcttccgagaccagatagctcacgccgcgcaggaaaaacataccggcgagggtgatgataaatgccggaattttcagcgcatcgatcagcaatcccataaacgcgccgaaggcgcagcccatggccagtaccagcggaaaggccagcagcggcgagatcccccaaaagccgatcgctttggcaagaaacacgccggtgaaggcaatcaccgacccgaccgacagatcgataccgccgctgaggatcacgaaggtcatgccgacggcgatgatcccaaggaaagcgttatcggtcagaatattgcaaatcacccgcgtcgaagcaaaacccggaaactgggtcaggcagtagagatagcccagcacgaataccgcgagggtgatcatcaaaggtaaattacgttttatcacggccgcgtacccctttcagtagaccgataaagcgcggcgactgaacgaccagtacgcacagcaccaccaccgctttcaccacctggttgagctctggcgggaaaccggagagtaaaatcccggtgttcatcccttggataatcaacgcccccaccaccgacagcagcagattaaagcgcccgcccattagcgaaccgccgccgatcaccaccgccaggatggcgtccagctccagccacaatccggcgttgttggcgtcggcgccgcggatatccgccgcgacgataatgccggcaatcgccgcacaaatgccgcttagtacataggccagcatcaccacgatgcgggtattcaccccggcattttttgccgcgcggatattgatccccaccgcctcaataaacatgccgagcgccgttttgcgggtaaacagccagaacaacagcagcgttgcgacggcgataatcaccggcgtcggtagcaacagcagcgatccgctgccgagccaggaaagcgccggtgaatcaaaggtgactatctgcccggaggtaatcagctgcgcgacgccgcgcccggcgaccatcaggataagcgtggccacaaaaggctggatcttcagcacggccaccaaaatgccgttccacaggccggccagcgcgcctgcgcccaatgcggcgagcagcaccaccggcaggctgtgcccggcgacggtcattgaggcggcggtcgccccggcgatagccatcaccgcaccgaccgacagatcgatgccgccggtggcgatgaccagcgtcatgccaatcgccagcagcgccaccggcgccgcgcggttgagaatgtcaatcgggctaccaaacagccgcccatcctgcagcagcacctggaagaaatgcggcgccaccaggctatccaccgctaataccagcaggagagcgataatttgcggcatccctttcggccagctaaagcgccgttttggctgtccgctttgtgatacggttctgggcatcatgctgggctccttatgccgcaatcgcgttcatgatcgccgggaccgatagctcggcaagcgggatttccgccacctgctggcgatcgcgcatgatgatcacccggtcggcgtagcccaccagctcttccagttcggaggagataaccagcagcgccagaccatcggcgcagagggtttctatcaggcgaataatctcagcgtgggcgccgacatcgataccgcgcgtcggctcatcgaggatcaggaactggggtttggtcagcagccagcgcgacagcaataccttctgctggttgccgccggagagaaattcgatcggttgttcagcgctgggagtgcgaatcccgagctggcgaataaagcgttcggcgatctcatgctgttcacggcgcgggatcggccgcagccagccgcgctgcgcctgcagcgccagcacgatattttcccgcaccgaagcagcggcgatgatgccgtcggttttacgatcttccggacagaagccaatgccgaggcaggaagcctgatgcggcgagcgcagcgtttgcggcttgcccttgatccacgctttaccgctgtcggcaggcttgatgccaaaaatgacctccgccgtttcggtgcgcccggatcccaacagcccggccaggccgacgatctcgcccggccgcacctgcagagtaaacggcgcaatcgtgcccttcttgccaaaatcttcaaacgccgccaccggcttatcgctaagcagcgtgcgcccggcgcgctgcagcgcctgatggtccagctcgcgccccagcatcattttgaccaggtcgatttgcggcagctcgcgggtctcccgacagccgacgaagctgccgttgcgcagcacggtaatacggtcgctgacggcatagacctggtcgagaaagtgggtcacaaaaatcaggctgacgccgttatcgcgcagctggcgcatcagggtgaacagcatctccacttcctgagtgtccaggctggcggtcggttcatcgaggattaatactttcgccgacaggtcgatggcccggcagatggcgacgatttgctgcatcgccaccgaaaaacggttcagcggttcgcgcacgtcgagcgagaagccgtaagaggccatcagcgcggtagcgcgtttttccatctctttgcgccgcagcagaccaaagcgcttcggctcacggccaataaacagattatccgccaccgacatattcggcagcaggttaacttcctggtaaacggtaccgatacccaactgctgagcgtgagcggtgtttttcggcgatatctgctgcccttccagccaaatcgccccgcgttcggcatggtacacaccggtgagcgctttaatcagcgtcgattttccggcgccgttttcgcccaacagggccatgatttcgccgcgccgtaggctgaaattaacgttatccagcgctttgacgccgggaaagaatttgcttaatccttcggtgcggaggatttcctgatgtcggtcggtggttatgattccccctgcatcacgccggatggcgctacgcttatccggcctacaaaagagcgcaatgtaggccgggcaagcgtaaagcccccggcattttcatgaaggcttagtagcccatatttttcttcttctctaactcttcttttgccgtatccggcaggtagagagtcgatttggtgatggtcagcttctcaggcagggtgccgtcttttttgtatttttccagcgcatcaaacgccggaccggccatattcggcgtcagctcgacgctggcattcgcctcgccggcaatcatcgctttataaatatccggcacgccgtcgatagaaccggtgaggatatctttgcccggcttcagcccggcctctttgatggcctgaatcgcgccgatgaccatgtcatcgttatgggcgtagaccatgcagatgttcttgccgttattctccgctttgataaagctctccatcacctctttccccttactgcgggtgaagtcgccggactgcgagcggataatcttgatgttggacgctttggcaatcgcctcggcgaagcctttcttacgatcgatagcgacgctggcgcccacggtgccctggagctccacgacgttacacggcttgccatcaacggttttcaccaaccagtcgccaatcagttggccttccagcacgttgttggcggtgacggtggtcatatacagcgacttatctttaacgtcgatcgaacggtcgaggaggaacaccgggatattggcctctttcgcttcttttagcaccggctcccagccggtcgccaccaccggcgcgataaagatcgcgtccacgccctgggcaatgaatgagcgcacggctttaatctggttttcctgtttttgctgaccatcggcaatcttcagggtgatgccacgcttcgccgcttcttccttagcaacatttgtttcggccgcgcgccagcccgattcagagccgacctgcgaaaatcctacggtcaggttggcggccatcgccatagacgacatagttgccgaaaccgcggtgacgagaagtaagcgcttccacataagatgttcctcgtagggttattgttggttaaatgctcacctgcgaacaaactatagacaatccgttatgtaactgaatgcgttacatcacacttcgaaaaagtaaataaaatgttaattagtgcgatttgtctgagctgagcggcgataaggcttcccgcccaacggcatgccctgcgctaatgacgaaaatttgccttctggataaccgccgctcgcaacattgaaaacggttacacaaaattattcagaatgtagctatctttatggattttagggttatctgatgaggagaaattcagacgcttcctcccatagccaggcaaaaagaagcgaagacattcgatgtgagttggctataataccgggcacttgtttgccaaacatttttaaaggaaacagacatgagcttactcaacgtacctgcgggcaaagagctgccggaagacatctacgtcgttatcgaaatcccagctaacgcagacccaatcaaatacgaagttgacaaagagagcggcgcactgttcgttgaccgtttcatgtccactgcgatgttctatccgtgcaactacggctacatcaaccacaccctgtccctggacggcgacccggttgacgtgctggtcccgactccgtacccgctgcaaccaggctcagttatccgctgccgtccggttggcgtactgaaaatgaccgacgaatccggtgaagatgccaagctggttgcggtaccgcacaccaagctgagcaaagaatacgatcacatcaaagatgtgaacgacctgccggaactgctgaaagcccagatcactcacttcttcgagcactacaaagatctggaaaaaggcaagtgggttaaagtcgacggttgggacaacgctgaagcggctaaagctgaaatcgttgcttccttcgagcgcgctaaacagaagtaattctgtttatccagcataaaaaacaccgcctccgggcggtgtttttgtatgggcctgttctggtttcagacggccaaaaaacaacgccacccgaaggtggcgttgccgttttcaattactggtctctgtccaaccagtttccgctctcaatctgcgcaaacccctcgacggagcgctggtagacatacatccacgcgctgccgtaaggcgtttggatcagatgacgcgcgtattcaccgcccttggtgcgcagcgcatccagctcggccagcgtcgatgcgtcgatacgatacacttcaccatgtactgtgccctcgcccggcaccgcgcctggatagtggcccaggctgtacagctgataatcgtcgacactatgagcgcccagcaactgggcgttggtcatccagtggctgttgccttgtttgcgtcgtaaactgccgtaaacaaatattcgcattgctaaaactcaaactgatagagcaaatcgagagcctggtctacgccagacaccgcttccatatatagcttaggcatcaggcgataacgcagggtaagcgtcgccaaagagtcgaagatgccgacgccgtattttacctgaagacctggcagcacatagccgctgactaccacctgggaggagtcgcctaccccctgggtatccagcgccaaattgcttacgccaaacgtctcgccgattttacccacaacctgaccactttgtgcaacccccattccaataagcattgaggtcattgccgcactatcgctctgttcgctgcctaaaccctgaccgcgtaacagataagaaagcgcttcctgctgcgacattgccgggtcggagaagatctcggccttcggctgatcggcagaaccggtgacgcgaacgccggcgatcacgtcgtcttcggtggcttccgggttacgaatcgcttcgatattgagcagcggctgatccggcggcccggagaacagcagctcgcctttacgcacaatcagatcctgaccataagcgtggaaacgaccttccggaatattgatctggccattgagccccagcccctgcttatcctgcgccactttcagatcgccggtcagacgcgctttcaggccgaaagcgtccagacgcacgttgttgccgacgtgaatcgtcaggttgctgttgatcggaataccggcgctctgcggcttaatcggcttcagatctttatccagcatcacctcatcggaagagacgcccaccgcgctctccggcacctcgttcaccacaatacgcgcccaaggtacgtcaacgcggccatcgaggttaaacaggcttggcgtggcggtaaacaccacatccggagaaacatccaggcggaccatcggcggcacggtaatgcgcacccggctgcccttcgccgcaatctgcgcgcgccagttgtcgagttgcgtccagtcggcgttaccgctcagcgcaatctgcccctgtttggtattcaccgtcccctgtagggtcgaacgcgttccgttaaagttcatcgccagttggctcggttgcatatcaaacggcataaagttgccgtcgatatcaacgccgctcaactgcatctgaccaaacagctgcgggctctgtaagttgccgcccagacgcaaacgagcattaagcttgccttctgctttctcgccgcgagcgaagatcgggttaatcatcgccagcgagaagttgctgatgttgacgttgccgcccaggttacgccgcccctgcgggtcggtcacctccacctggccatcaagctggccgttgttggtcaggcgtatcagccagcccaactgcgcccggttgttatgcaggtcggcgctgaggttaagcgtatcgaaagccaccggcagcggtgcgtcgttgaccgtctgggtgactttgacgttgcgcccgctgagggtgactttgccctgcggcagcccctctttggtggtgtcccagctcacatcggcgttaccgctaaacacgccgcttgcctgggtcgcctccggcataaacggcttcagcatcgccagatcgaaacggttgagattgaccaccgcgcgcccgctggcgccggcatcgatggtctgcggtacgcacagctcggcattcgggttgctccagcagtgcggcccgatgctgattttctgttcctgattacggtaatccagcgcaatgttgcgcgtcagcgccaccggcccgaccggcgtctggaaacgggtattgctcagggtgcccttccagcgctcctctttacgatcgaagctgcccgccagcgtcagctggcccgacacaggatcgccctgtacgcgcagctgtaaatcatgctgcttctcagtccctttggcattcagctgcaccaggctgatgttaaccccaggctggctgatgcgatcgacgcgtacgtcaagattaccgccaatctggtcgctggatttgacgtcgcctttgacgttgacctgagctaccgtcagttcctgccagcgtaaagcgcgggcggtgatatccgccagcagctgcggcgcatcgatggtgccgcgcaccttcagcagacctttcgccgtaccgccgagccccggcaacgcgttatcgagatgcggcgcatcgatggtggcgtcgagattgaggtctttcacccccagctcgcctttcacatcggcgctgtttgggccaagcgccagatgcagtccaggcactttccactgcatatagctgttaccctgcagcgaaccgtggacatccactttattctgtttcacgttgccggtaattttcagctcgggaaccgccatctgccagctgctgccatacaggctaccctgggttttgataatcccgttcagcttcgacggccagtccggcacctctttggcggtattaatgccatcgagggtcaattcgccgcgccagctgatcgcctgctgccagtcgagcaacgctttcagttcggttttcccctccagcgccgctacggtcagcttatccaggttcacctgctgttcattgcctttagcattaagggtaattttagccggcggcagcgactgtcctttcaccgcggtactaaacgccatggtgtagtcggtcattttgccgctgaatttcagatgcagatcatccgcctggaactgtttctcgccggtaaacggccagtacagctgcttactcttcacttccatattcagcggcagaccggcttccgccagctgcgcttcggcgcgcagggtcatggccaccgagccggctaaatcaacgccgacctgcagttttttacgcagctcgccgcctactttcagttttaccttctcgcctttcagcgggtcgatgttcagcgtgctgtcgagggtgatgtcgaccggccagttatcctgcagttgcgcggtgccggaagcggtaaccttgccctggtcggaatcgacgtccagcgcatcaagtttcatctgcccgtcgatgctgctcaccttcagcagcaggttgtagacggtcatatcggtgtcgccggtcaggcgcagctgttcgccgcggaactcctgaatattaaggttcagcggcagatgcacatcgaccatttccggtagcaccggctgcgagaacagatctttcatcgtctcgccaagcggcttctcttccggtttcggatggtcaattttcggctccaccacctgctcctgcgccacttttgctaccttcggcagggcgatgagcaagccctggagcgaagtcggcgtcagggtcaggtttttctcctgccagttcaggccggtggagaaatcgcgcagcgaaacggcggtgtcgtcgattttgacattgacgttatgcagcgccacgcggctgagggtaatggggtatggcgtcgacaggttcagcgggccggaatcttcttcctctaccggcgtcgaaggaggcatctttttggtatcgatagcgacgtagatatcacgcaacgagatatcgttaacgcacaggctgctatcccacaggcagcgcagcttgacgccgagatggaactggccggccgtcaccgctacgcccggctgttcgaagcgcacgttctgtaaggtcaggtcacgccagccgccggtaaccttgccgatctccagccccggcacccagcggtccgccgctttcagtaccagatgcaaaccggtagtagtgccgactaaaaagccaaccgcaccaatcagcaacactaaaaagagtaatacgccgaggcttatcttcttccataaactcataattcaggccccagaccgatataaaactgtaaaccgtgttcttctttgtcgccgataggtctggcgatatccagcttgatcggcccgaccggcgattgccagcgcacgccgacgcccacgccggttttaaaatcgcttttacggatgtcgctcaccgcttcgccgctgtcaataaacatcgccccccaccattttccggtgacgttgtattgatactccagcgagcctgtcgccagctttgacgcaccgatcagcttgccgtcgtcgtctttcggcgagatcgacttgtatttataaccacgaatgctgcggtcgccaccggcgaagaaacgcagatccggtgggactttgctgaagtcatcggcttcaatccagccaaggttgccgcgcaccacgaagcggtggcggtcatagagggtgcggatccacacgtcctgcgcctgcatgacgataaagttaatgtccgagccccacatggtgttggagtagtccaccgaatagcgctgggaatcgccccaggttggcatcaggccgccgcgggagcgggtccggttcaccgagacgccgggataaagcagcatggtggtattggtgacgttagcctgggtaaagtggtccagactccagcgcagattaatcgcgcgctgccagccgctcgacatctcccaatagcgcgacagcgccagggtggtggagtcggccttggtatcgttaaggtcggtacgcttaaaaccgccctgcatcaggtaatactgctcaagcgggctttttaacagcgggactttgtagctgaaatcgaactgctgctccggcgcggagaggctgatgctggagctcaggctgtggccgtaggagttcatccacggctttttccacgtcgctttcacgcgcggcccgacgtctgtcgaatagccgaccccggtttccacggtgttctctttgcgtggcgaaacgacgccctgcagaggcagcaccttggttttgcgtgatttatcaaactgcggcgcgacgaccaccgagttaaaccagccggtcgccgccaggcggcggttcagctcagccaaatcctgcgaggtgtaataatcaccctgtttaaagggcaccagactttgcaggtactcttcgcggatctgcgaaccggtaaaacttaccggaccaaagcggtaacgttcgccgctgttgtaatctatatcccagaaagcctgatggcgatcgagcgacacgccgagctggcttttattgaactcgctatcgaaatagcctttacgcagcgccaccttggtgagcgagcttttgaagccgtcataatcactgtgattaagtaccgtgccaattgccggacgcgttttcagcaggtccagataatcgtggtcggtgcgcgcgccgccgcgcaggataacctcggtaccgccaatgcgcaccggctcgccgggagttactttggcaatcagtacctgacgcccttttttgggcggcggacgcagatcgaaatcgatagtgggttcataataacccagcgctttcaggccctcgcggatggcgtcatcgacgcgcgcgcgaaagcgacggtccggcgtgacctcatcgctctggatcgtggatagttgggcgcggacgtttttttccagttccccggataacccctcaacctgcaaacgcacattcgctgcgctggcgaccccgctgaccagcaaaaggctggtaacgcatatctggcggatttgttgcacgtgttctcctgaatatccttgtttccccccgaaggaaacgcaagtgccgctccacggcttaacaaaaccctaacaactaagggttgaaaaagtgacggtaacccaaataattcttatgtttaaatttagacgtattgagcgtgtttattgtctaaaaagatacgcgacgttacaaccttaaccacaaattgcgaggccaaccgtgagtctatttgataaaacgcatcttgtcgcccaggcggatgcactaccggggcgcaacacgccgatgccggtagcaacgctccacgccgttaacggccactcaatgaccaatgttcctgaaggaatggaggtcgcgctgttcgcgatgggctgcttctggggcgtcgagcgtctgttctggcaattgccgggggtctacagcaccgcggcgggctataccggcggctacacgccaaatccaacctatcgcgaagtctgcagcggcgacaccgggcacgcggaagcggtgcgtgtggtgtatgacccgcaggtcatcagctatgaacaactgctgcaggttttctgggagaaccacgatccggcgcaagggatgcagcagggtaacgaccacggcacgcagtaccgttcggctatctacccgctgacgccagagcagcttgaagcggcgcaggccagcatgctgcgttaccaggcagcgatgcgcgacgccaacgacacccgcgagatcaccaccgaaatcgccacggcgaaaccgttctactatgccgaggacgatcatcagcagtatctgcacaaaaatccgtacggctactgcggtatcggcgggattggcgtttgcctccccccgcaggcgtaatcctgaagagtaaggccgctggcgagaataattatcgctctggtggctttacagacatttacgctatactacgctgtgtcatagccggtccagcgccttcggaccggttttttatgtattccacattaaaagagttatccacttcccttccgaggatctggcctcaacggtcagaaaagatatgttaaacagtattttagtaatacttttccttattgccgtcagtgcatttttttcgatctctgaaatctcactggccgcatcacgtaaaatcaaactcaaattgctggctgatgaaggcaatgtgaacgcgcagcgcgttctcaaaatgcaggaaaaccctggcaccttcttcaccgtcgtgcagatcggccttaacgccgtggccattctcggtggtatcgtcggcgatgccgccttttcgcctgctttccacagcgtactgagccgctacatgtcgccggagctttccgagcagctgagctttattttctccttcaccctggtcaccagcctgttcatcctgtttgctgacctgacgccgaaacgcatcggtatgattgcgccagaagccgtggctttgcgcatcatcaacccgatgcgcttctgtttactggtcttccgcccgctggtgtggctgtttaacggcatggcgaacaacatcttccgcctgtttaaaatcccaatggtgcgtaaagacgacatcacctctgatgatatttacgcggtggtggaagccggtgcgctggccggggtactgcgtaaacaggaacacgaattaattgaaaacgtctttgagctggaatcccgtaccgttccctcttcgatgacgccgcgcgaaaacgtgatttggttcgatctgcatgaagacgagcagagcctgaagaataaagtggcggaacatccgcactccaagttcctggtatgtaacgaggatatcgatcacatcatcggttacgtcgattccaaagacctgctgaaccgcgtgctggcaaaccagagcctggtgttaaccggcggcgtgcagatccgcaatacgctgatcgtgccggataccctgacgctctctgaagcgctggaaagctttaaaaccgccggcgaagacttcgcggtgatcatgaacgaatacgcgctggtagtggggatcatcaccctcaacgacgtcatgaccaccctgatgggcgacctggtcggccaggggctggaagagcaaatcgtcgcccgcgatgagaactcctggctgattgacggcgggacgccgatcgacgacgtaatgcgcgtgctggatatcgatgagttcccgcagtccgataattacgagaccatcggcggctttatgatgtttatgctgcgtaagatcccgaaacgcaccgatgcggtgaagttctccggttacaagtttgaagtggtggatatcgataactaccgtatcgaccagttgctggtcacccgcatcgacaacaaaccaacggtactggtaccgaaactgcctgatatcgaagaagcggcgaaaaaagagaaaggcgcggcgtaagcggccctgaaaacatcaacggctcccatcgggagccgtcttttttcgtgccgtcataccacgttatgcggtctcagtttgcagacgcataacctgacgattgacttcggacatcactgagaaatgcagcttgtccttaaccttcgggataaggatttttcccttatcaaattcaaaagcgccaacgtccttgatgtacaaccgtccacgaaacaggatcttcacgtacttcgccacttgcagcggattgtagcgttggaaaattttcattgttgtctcctgccagggttacgctcctgcggtgccacagttagcccgcgtatcgggagcgcaaattttaatgccctaaaactatagtccagatttccgaagacacccagtctgtagaagtttttttaccctttgatgacaataattcagaattttcgtttcaggcatacgtagttgttagtataagtttccgtttttgatcgaatgtgtgcgttggcacgcaaactggcatcacgcttgcgggtaatggcgacgaatcgcacttatcattaaacaagaccaagtggtcggatcacctgcatataaaaaaggatatctcatgaccctacgtaagttgctggcggtttccgccctcctgttgccgttaatggcttcggcgcataattttgtcgacggtcagcgcgtcgcgccggtaggcatcgccgatcgcggagaactaatactgaataacgataagtttagctacaaaaactggaatagctcgcagctggcgggaaaagtgcgcgtcatccagcatattgccgggcgtacctcggcaaaagagaaaaatgccaatttgattgaggcgattaaggcggctggcctgccgcacgaccgctatcagaccactaccatcgtcaatactgacgacgctatccccggctccgggatgttcgtgcgcagcagtattgagagcaataagcagctctatccgtggtcgcagtttatcgtcgacagcaacggcctcgcgcgcaaagcctggcagctcgatgaaggcagttcggcaattgtggtgttagataaagacgggcgtgttcagtgggcaaaagacggcgcgctgacccagcaagaggtgcagcaggttgtcgacctgctgcataagctgcttaataaatagagacgcggaagccggggttgaggaaggattcacgcggcgtgtagtcgagggttttaccctgccagtcgtgaacgtgcgccccggcggctaccgcgaccgcatgaccggcggcagtgtcccaggtgctggtcggcccaaagcgcggatagagctgcgcctggccttccgccaccaggcagaatttcagcgacgaaccgattgaggtggtctggtgctcgcccagttgctccagatactcctgcagctccgggtcattaccgtgggagcggctaatcaccaccagcggcgggcgagcatcgcgaacctgaatctgcttgcgcacgccgcactcttctttccacgccttgccattttgcgcgctgtacatcactttcatcaccggcgcgtacaccacgcccagcgtcggtttgccgttttcaatcagcgcgatattaacggtgaattcgccgttgcgcttgataaactctttggtgccgtccagcggatcgaccagccagtagcgctgccagtgctgccgcacttcccacgccggcggatcctcttcggagaggatcgggattgctgcatccagcgcctgcaggccgctgacaatgactttatgcgcggcgatatccgccgcggtaacgggagaatcatcctttttgctgctcacatccatcggctggttcccatcgtagacatccatgatggcatcgcccgcggtccgtgcaagctgacatacttgttctaacattctccacctcttctggttacagtggcgttaactcgttgttttatttatatcgcatcatcaccagttccgctatctgtgataacactagcggtttccattcacgcttttctggcagaattcacaattctgtaagcaacagaatgtaaatacattttcttttgtgccattgctcataaaaaaggacgcctctgatgattaagtttagcgcaacgctgctggccacgctggtggcggccagcgtcaacgcggcgacggtcgacctgcggatcatggaaaccaccgatctgcacagcaatatgatggatttcgattactacaaagatgccgcgacggaaaaattcggcctggtcagaaccgccagcctgattgaaaaagcccgcgcggaagcgaaaaacagcgtgctggtggataacggcgatgttattcagggtagcccactgggcgactatatggcggcaaaaggacttaaagagggggatgtgcatccggtttataaggcgatgaacaccctgaattacgccgtcggcaatctgggaaaccatgaattcaactacggtctcgacttcctgcacaaggcgctggccggggcgaaattcccctacgttaacgccaacattatcgatctcaaaaccggcaaaccgatgtttacgccctacctgattcaggataccgaggttcaggatagcgatggtcaaccccataccctgcgcatcggctatatcggttttgtgccgccgcagatcatgacctgggataaagctaacctcagcggcaaggtgaaggtcaacgacatcactgaaaccgcgcgtaagtatgtaccggagatgcgcgcgaaaggcgctgatgtggtagtcgtggttgcgcattccggcctctccgccgacccctatcaggcaatggcggaaaactcggtctactacttaagccaggtgccgggcgttgacgccattatgttcggccacgcccacgcggtgttccccggtaaagacttcgccagtattaaaggcgcggatatcgccaaaggtacgctgaatggtattccggcggtaatgccgggaatgtggggcgatcatctcggggtggtcgatttggtgctgaataacgacagcggtaaatggcaagtgacgcaggctaaagccgaagcgcgacctatttacgacgcggtagcgaaaaaatcgctggcggcggaagatagtaaaatggtggcggtgctgaaagccgatcacgacgccactcgcgaattcgtcagcaagcctatcggcaagtccgccgacaacatgtatagctacctggcgctggtacaggacgacccgacggtgcaggtggtcaacatggcgcaaaaggcctatgtcgaacactacatccagggcgatccggatctggcgaagctgccggtgctttccgccgccgcgccgttcaaagtcggtgggcgtaaaaacgatccggcaagctttgtcgaagtggaaaaaggccagctcaccttccgtaacgccgccgacctctatctctacccgaacacgctggtggtgatgaaggtaagcggtaaagaggtcaaggagtggctcgaatgctccgccgggcagtttaaccagattgaccccgccagcagcaaaccacagtcgctgattaactgggacgggttccgcacctataacttcgacgtgattgacggcgtcaattaccagatcgacgtcagccaaccggcgcgctacgacggcgagtgccagatgattcacccgcagtcagaacgcatcaaagacctgacctttaacggtaagcctatcgatccgcaggccaccttcctcgtcgccaccaataactatcgcgcctacggcggcaaattcgccggtaccggcgacagccatatcgcttttgcctccccggacgaaaaccgttcggtgctggcggcgtggattggcgcacagtcgaagaaagatggcgcgatccatccggcggcggataacaactggcgactggcgccgatccacagcaaaacgccgttggatattcgctttgagacctcgcctggcgacaaagccgcggcgtttatcaaagagaaagcacagtatccgatgcggcaggtggcgaccgatgatatcggtttcgctatttatcagctggatttgagtcagtaatgcctgttccccggtggcgctgcgcttaccggggctacaatgctgagctggccggtagcccggataaggcgccagccgctatccggggttacagggagtgatacattttcactccctgtggttagccagcaccgcggggagattcagctcgatccagtccgccagcgccgccaccttctcgctcacctgcaggccgagcggcgtcaggctatattcaacatgcggcggcaccaccggataagagacgcggtcgataaagccatcctgttccagcgcctgtaaggactgcgccagcatcttttcgctgacgccgcccattttgcgccgcagatcgctaaagcggtgggtcccctcgcgtagcgccaccagaatcaacacgccccagcggctggtcacgtgttttagcacatcacgcgacgggcactgttcagcaaacagattcccgttgcgcagtttgtcgctcagcgtcggttcggccattttatacttacctttttgtacgtacttactaaaagttagttaaggtgttagcttaccacaactgccaatgaacacgaaggagaagacctatgatcgcgattaccggcgccaccggccaacttggccagcacgtactgcatgatctgttaaaaaccgtccccgccagccagattgtggcgattgtccgcaacccggcgcaagcgctcagccagcagggcgtcatagtgcggcaggccgagtacggcgatgaagccgcccttaccgccgcgttgcaaggagttgataaactgctattaatctcctccagcgaagtcggccagcgcgccgttcagcaccgtaatgtcattaacgccgccaaagccgctggggtgaaatttatcgcctataccagcctgctgcatgccgatacctcaccgctgggcctggccggtgaacatatcgaaaccgaacaaatgctggctgattccggtattccttacgcgctgctgcgcaacggctggtataccgaaaactatttggccagcgcgccgccagcactggaacacggcgtgtttatcggcgccgccggggagggtaaaatcgcctccgccacccgtgccgattatgccgccgccgccgctcacgttattgccggtgagggtcatgccgggaaagtttacgaactggcgggggacaacgcctggaccctgagcgaactggctgccgagctgagcaagcaaagcgggaaaaatgtggtttatcaaaacctcagcgaagccgatttcgccgccgcgctgaaaaacgtcggcctgccgtccgggcttgccgatatgctggcggattccgataccggcgcgtcgaaaggcggactgtttgacgacagccgcactctgagcaaactgattggccgcccgaccacgtcgattgccgatagcgtaaaaggcatcatttaaccgctccctgtcagtttttgcggttgcgtcccggcgcttcatctctaatattgaagggatgaatcgtcgggagacacggcatgcagggcgtaccaccacaatttagcgatgaaaaagaccgcgcgcgctttcgccatctcgaacaacttcccggcgttgagctctatcacgcccatatttctcgttatgcctttgaaccgcatacccacgaagccttcggcatcggcgtgattgaacaaggcgccgaacgctttcgctatcgcggcagccagcacgtcgcttcagccaattccatcgtcaccatgaatccggatgagctccataccggcgaggcggaaaccgccgaaggctggcgctaccggatgatttatctggagccggatcggctggaagccttcaccggcgttcgccactggtggttcagtgaggtcgtgcgccaggagccgcagcgtgcccggcaaatcggccaactgatttacggcctgtggcacgctgacgatccgctggcgcagcaggggatactgctcgacctggttgataccttccgcccgctggctcaccatgcgccaatggcgccggaagcggcgcaccgcttcgatcgggtacgcgactacctgcacgataactatatgcgcgccgtcagccttgatgaactggcgcaggtggcagcgctcagcccctatcacttccagcgccagtttaaagcccactttcacgttaccccacaccagatgctgatggcgattcgcctgtggcgcgccaaggcgtttctgacccacggcatgcctgccgccgaagtggccatcgccgccgggttaaccgaccagtcacatttaacccgcgccttcacccgtcgctacggcatcacaccggtgcgttaccaaaagcaggtcgccgggcgctaaagcgcaatctcatacaatattctttccctcgtaccctcctacacttggcgcaagcaaactgaagatggatgtcatcatgattagcggcgtgttgtatgccctgctggcggggttaatgtggggactgattttcgttggccccttgctggtgccggaatatccggcggtgctgcagtcgatggggcgctatctggcgctgggacttatcgccctgccgctggcgtggctcggccgcgcgcgtctgcggcaactgagcgttaaagattggtggaccgcgctggcgctgaccatgatgggaaacctgatctattacttctgtctggccagcgccattcagcgcaccggcgcgccggtatcgacaatgattatcggcaccctgccggtagtactgccggtgtgcgccaacctgctgtatagccagcgcgatggcaagctgccgtggcggcggctatttccggcgctaatctgtattgcgctggggctggtgtgcgtcaacgtggcggagctgcagcacgggcttcctgatttcagcccgtggcgctatggttcgggcattgttctcgcgctgatcgccgtcgtctgctgggcgtggtatgccctgcgcaacgcccgctggttgcgtgaaaacccggataagccgccgatgatgtgggccaccgcacaggcgttggtcaccctgccgctctcgctggtcggttacatcgccgcctgctggtggctgcagggccaacacctcaactttccgctccccttcggcccgcgcccggcggtattcatcgcgctgatgctggcgattgccgtgctctgctcgtgggttggcgcgctgtgctggaacgtcgccagccagcgtctgccgacggtgatcctcgggccgctgatcgtcttcgagacgctggctggtctgctgtacaccttcctgctacgccagagcctgccgccgctgctgacgctgagcgggatcctgctgctggtactcggcgtggtgtcggcggttcgcgcccgcccggaaaaaccggttctgcaggaactgcgcgtcgagccaaaaaaatagcctggtatcctaaaggggtattcccatggattaaagatgcatttaatatgcatcttatattcttgatgacgaggtaattgctatggctttccgtgaccaacctttaggcgagctggcgctgagcatcccgcgcgcctccgcgctgttccgtaaatacgatatggattactgctgcggcggcaaacaaaccctggatcgcgcggcggcgcgcaaagcgctggacgtcgcggcaattgaagccgagctgacaaaactggccgagcagccgatcgagcgcgactggcgcgccgcgccgttcaccgacatcatcgaccacatcatcgtccgctatcatgatcgtcaccgcgaacagctgccggaactgattctgcaggcaaccaaggttgaacgcgtccacgccgataagccgaacgtgccaaaaggactaaccaaatatctgaccatgctgcaccaggaactctccagccacatgatgaaagaggagcagatcctgttcccgatgatcaagcaggggatgggaacccaggccggtggtcctatcagcgtgatggaaagcgagcacgacgaagcgggcgaactgttggaagtcatcaagcacatcacccataacgtgacaccgccgccggaagcctgcaccacctggaaagcgatgtacaacggcattaacgagatgattgacgacctgatggagcacatcagtctggaaaataacgtgctgttcccgcgtgccctcgccggaaaatcataaaaaaaggcgcccgcaggcgccctctcgacattgtcagtttattggccactccgggtggccttttttatttcgccagacgttttttaccggcaaacagccagcccgcgcccagcagaacaaaccacagcggggtaaccatcagcgcttcgcgagtatcatcttccagcgtcaacagcaccagtacgaagacgaagaaggccatgcacacccagcacatcactttacccagcggcatcttatagatggacttctcgtgcagctgcggacgctttttacgatagaccaggtaagagcagaggataatggtccagacgaacatgaacagaatcgccgacaccgtggtgatcatggtgaacgcggcaatcacgctcgggttgaccatcagcatcaccacgccgcccagcaggcacatgcaggagaaggttaagcccttcgccggcaccgcgcgtttagacagcttggcgaacattttcggcgcctggccttcctgcgccagaccgaacagcatacggctggtagagaacactccgctgttagcggaagaggcggcggaagtcagtaccacgaagttgatcaggctggcggcagccggcaggccgaccagaacaaacagctcaacgaacgggctcttgctcggcacgacggagctccacggcgtcaccgacataatcacaatcagcgcgaagacgtagaacataatgatacgcagcgggatggagttgatcgcccgcggcagcgatttttccgggtctttggtttccgccgcggtggtacccaccagctcaatccccacgaaggcgaataccgctatctggaagccggcaaagaaaccgctgaggcctttcgggaaccagccgccgtcattccacagatgcgcgaatgaggcttcgacgccggtcggcgatttaaagtgcatcatcaccatcaccaggccgaccacgatcagcgccacgatggcgacgattttgatcatcgcgaaccagaactccatttcgccaaacatcttcacggtcgcgaggttcaggcccagcagcagcaggataaccgctaacgaagcgacccagtcagaaagcccgggaaaccagaactgcgcgtaggcggtgatggcgacaacgtccgccatcccggtgaccacccaacagaaccagtaggtccagccggtaaaataccccgcccacggccctaacaggtcggaagcgaaatcactgaatgatttatattcgaggttcgacagcagtaattcgcccatggcacgcatgacgaaaaacagcataaaaccgatgatcatataaacaaaaataatggatggcccggcgagactgatggtcttgccagaccccataaacagcccggtgccgatcgccccgccgatagcaataagctgaatatgccggttagtgagatttcgccgtagcgattgttcagtcgtctcctgctcgtcggcaacgactttgacctgatctaccatgtgattttcttcctgttgtacctgtctgtgttgttcaggctctgttggcctgtcatttgtcgcaaccctggcaagagggtttatcgatattaggtaagaatcggagggatgaatactatgatttagatataatgttaattttatgtttaaagtgagtgttatatcaccaatgtaacgcgaaacagctcacaaaaatacactcaacgaacttatatgcaatacaaaattccaataaatttataacttaaggattttacactgtttttatcggctccctccccctggcaggagaggaagcccctggtgcttaaataatgtccagcagctcaacttcaaagatgagggtgctgaatggcgggatagaagcacccgcgccgcgctcgccataagccaggttgtgcggaatagtcagttcccatttggaacccaccggcatcagggtcagcgcttcgatccagccgccgatcacgccggtcaccgggaattcagccggttcgccgcgggccacggagctatcgaacacggtaccgtcaataagtttgccggtgtagtgaacgcgtacacggtcggtgcgcgccgggatcgggccttcgccctgcgtcagtacgcggaactgcaggccggattcagtgctgttcacgccttctttttcacggttttcatcgaggtatttctggccatcagcggccatcgcctggaagcgctcgcgacgcacggcgtcagcgcgttcatggatttcacgcagcgcgcggtgtacggcttcaaccggcacctgcggctgattaccttccagcgcatcggcaatgccggcaaccagcgcttccggcagcagcccctgcaggccggattcgctcagttgttgtccaacctgcaagccgataccgtaacttgcctgcgcttcgatagtgtcaaaagtcggggttgccatctttgttccttttttgggtgataaacatcttgagaaaagcgttcgaaagcataacagccatagaggaatgggtaaaactttgtcggcggatgatgacaaatctcagcgaaacagaaacaataggcgatatcaggttaacttctaccttcaggacgttagccgtctatactcataagcaggataaaaatatgcggagcaggaggaaagccatgcccgggcgctttgaattgacatctaccctggcgaagatctggcacgccccggatcaacttcgtctcatggatccgctaccgcccatgcatcgccgcggcatcatcgccggcttcctgctggtcattattggtttcctgctcccctccggtgataatagcacgccgacccaggccagccgcgaagctaatctcgatctgcagtcccagtctcagccgcaaggttcgggcaatcaggccgtgccgcttccgccaatcaccaatacaccgacggtcagcgatgccgaccaggttgcgcctgtggcgcctgaagccattcaggatgaacagccagaccagacgcaaaccgcttcctcttctcagccgtatcaacaaccggcgcagcagcagtctgctccgggcattgaacagcagtggcgcacctaccggattgaatccggcaaaacgctggcgcagctgttccgcgaccacggtctgccagccactgacgtctatgccatggcgcaggtcgaaggcgccggcaaaccattaagcaccttgcaaagtggacaaacggtgcaaattcgccagaacgccaacggcgtcgtcaccggccttactatcgataccggcaacggccagcaggtgttgttcacccgccagtcgaacggcagcttcgtgcgcgcgcgataaacacttcgcttaggtcgggtcgaacacccggcctaacgcgcctggtttttgttcacccagcggatccctacacacaccagcaccagcgcgatcgcgtacttccactcaaaaatattctcgccaagaaagatcgccgacagcaccgtcccggccaccgggataacaaagttaaacggcgcaatcatactgacgcgattgtgcttgagcagcacgctccatagcgcaaaagctatcgacgacagcaaagttaaatagccaaggatcatcgctgcggtcaggctgtgcatccgtagctccccgccggtcagatacccgcccaccaccagcaccagaccgccgaaggccagttgccagccggtcatcaccgttgggtcgacggtttgcgagatgcgtttgccgtagagcgtcgccgccgagaggatgaacgccgccagcacgacaaatccatccccctgccagacaaaattaaaatcgcccaatgaggtgttgaagttcaccaacatcacgccgacgaagcccagcacacagccgatagttttgttatagctgagccggtcattctggtagataaaatgcgccagcagaacgctgaagaacgtcccggtggcattcataatcgatcccttcactccggtggtgaatgccaggccaacgtagaagaaggcgtactggatagcggtctgcgtcagccccagcatcgccagctgcccgcactggcggccattgagtcgggcgatgggtttgcgctgcgcgagcgcaaacagcagcaacaataagcccgcaaacaggaagcgatatccggcaaaaacaatttttgagggaacatcatcggtggcgatgtgcagaagctcatagccgtttttaatcgccggataagaactgccccacagcagacagcatagggtcgcgcagacataagctacttttttattggcaaaaatcgagggggtcggaaaggaagcgtccattaactttaccggaaataaaatcgtgttttattttatcatccagaaagtggagagaatagctaccataccagataaaaatcaggctggcgctaaaaagcaaaacgccggcacaaggccggcgcatcgacgtgagttgagtaaaaaattactcagctacaacgttaacaaccagtttagcgaagacttcgctgtgaacctggaagtctacttcgtgctcaccggtggtgcgcagaacgccgttcggcaggcgaacttcgctcttcgcaacggcaacgccagctgcagaaacagcgtcagcgatgtcgcgagtaccgatggaaccgaacagtttaccttcgtcgccagatttggacgcgatggtaacggtgcccagtgcgttgattgcttcagcacgtgcgttagcagcggccagaacgtcagccagtttggcttccagttcagcgcggcgcgcttcgaagaactcaacgtttttcttggtagctggaacagctttaccctgtggtaccaggaagttacgagcatagcccgctttaacgtttacctgatcacccaggctacccaggtttgctactttatcaagcagaataacttgcattaccttatcctctcaaagtcgtattaatggaccgtgaccgattactgatgacgatcagtgtacggcagcagggacaggtagcgtgcgcgtttgatagcgcgagccagctgacgctgatattttgcacgggtaccggtgatacggcttgggacaatcttaccgctttcggtgatgtagtttttcagcgtagcgatatctttatagtcgatctcttgaacgccttccgcggtgaaacggcagaacttgcgacgacggaaataacgtgccatatggctagtctccagaatctatcaattcaatctgctcggcatgcagaaccattttactcaagccgttctttgccttatggcaactaatgaacccttgaacggtgactgcgctaccgaccgttatactgtgagtaatggcctggttcacgtgtccgctaataataacgggcatttggcaccacgcctgccggtgaaaaccggcttcctcctgcacagaacgatgctcaagcacgaactggcaatgaggaattcctgacgggctgacctttcgaaggggcatcctgcacacggtgccggacaacaccagacggttggtcatcaggattactcttcagaatccccagcttcagaatcatctgcggtttcgttagcgaaatcttcacgacgctcacggcgctcgtctttcgctttaaccatcggagatgcttcggtaacagcgtgcttagtacgcattaccatgctgcggataacggcgtcgttgaagcggaagttagtttccagctcatcgatcgcttcctgcggcgcttcaacgttcagcagaacgtagtgagctttgtgcagtttgttgatcggataagccagctgacggcggccccagtcttccagacggtggatcgtaccttctgctgcagtgattgcaccagtgtaacgttcgatcatgcccggaacctgttcgctctggtcaggatggaccataaaaacgatttcgtaatgacgcatcgaattgctccttacggattattcagcctcctgtctgggtcagccgcggcccatggaggcaaggaacgtgttaaagggcggctgaaaaattgacgcgtcattctaattgcgcgcccccaggaacacaagcgcatttgcacaaataattcgcactaagcgccaagctgggctaagtgggtgatttaaaattaaccaataacgaacgcggcatttttttgaacaactgcatcagaaaaggtcgctatcaggcgacgcgccagcgattacaatttaatcaatggccagacaccagcaagaggagtccagcgttttacccgtactgtcagtaaggagcgttctatgaaaagcattatcatcgccgtaatggctgcgctactccttagcgccaacgcgctggcagccatcaaaatcgatgggcgtcaggctcgcaacatggacgatgtgcagagtctgggcgtaatttatatcaaccataatatggctagcgagcacgaggccgaccaggccctgaaccaggaaagcgatgccctgggagcgaagtacttccagccaatcctgattcacgaaccgcagagcaatggccttattcatgccagcgccgctatttaccgctaacccaggtcgatgcttcgcctctcctcacgaggggcgaagcgatagccgatgtaaacgcaattgagaattattttccaaactgacttaccagcgtcatcgcaacctgatttaatcatcaattcaccgtttgttaatcaggagtgattgatggtcccgcgtttcacgacgttaggtcgcatcccgaaaggagtttgggtgctcggcggcgtcagcctgctaatggatgtctcatccgagatgatccacagcctgcttccgctgtttatggccaccacgctcggcgccagcgtcattattatcggtcttatcgaagggctagccgaagccaccgccttaattctcaaagtcttctccggcgtcattagcgactacgttggcaaacgcaaagggctggcgctgcttggctacgggctgggggcgctgagtaaaccgctgtttgccctcgcgccgagcgccggggtggtatttagcgcccgcatgatcgaccgcgtcggaaaaggtatccgcggagcgccgcgcgatgcgctggtcgccgacgtaacaccgccggagatccgtggcgctgcctacgggttacgccaggcgctggataccgtcggcgcctttctcggcccgctgctggcggtgctgctgatgttcatctgggccaacgattttcacgctatcttctgggtggcggtcattcccgccgtactatccattgctctactgggctttggcctgcaggagccgaaatccgccatcgcgcacaaacgtagcaacccgctgaagcgcgaaaacctgaaaaagctctctgccgcttactggtgggtggtggcgatcggcagtatcttcaccctcgctcgcttcagcgaagcctttttggtgctgcgcgcccagcaaatggagatcccgctgtttactattccgctggtcatggtcgcgatgaacctggtctacagcctcacggcttacccgttcggtaagctctctgacagcatgagccacagtaaactgctgcaatgggggctgctggtgctgatcctcgccgatatcgtgctggcgctcagcggccactggagcacgctgctgatcggcgtcgcgctgtgggggattcacatggggatgactcaaggcctactggcggccatggttgcgcataccgcgccgccggaactacgcggtacggcattcggcatgttcaacctgatgagcgggctggcgctgctgctggccagtaccggcgcggggatactctgggaaagcttcggcgccgcatcgacgttttacgccggcgcggttatctgtctgctgacgctcatcggcatgcgctgtatgccatcggcctatcgtcagggttaaaaacggctccggggccagaccagttgcttcaccctgaggtgaaagccccggagcgcgtagcttacttctgcccgtagtaggcgtcaggcccgtgtttacgcagaaaatgtttttccattagccagttgtcgatgggctgtagctgcggattaatgccgcgggcgatccacgccattcgcgccacttcttccatcaccaccgcattgtgcaccgcctcgtgggcatctttcccccaggagaagggcccgtgctgatacactacaattcccggcgtatgtaacgggttggcctcgcccagcgtttcgataatcaccttcccggtgttcaactcataggcctcttccacctcctgtgcgctgagcgcccgggtgcaggggatatcaccgaagaagtagtccgcgtgggtggtgccgagcgccgggattgccagccccgcctgcgcccaggcggtagcgtgcgtcgagtgggtatgcaccaccccgccaaggccggaataacggcggtataacgcaaggtgggtagcggtatcagaagagggacgccagcgcccttccaccacgttgccctgcaaatcgaccaccaccatatcatcgacggtcattgactcgtaggctacgccgctgggcttaatcaccaccagcccacgctgccggtcaattgcgctgacgttgccccaggtaaaggtcaccagcccgtggcgcggcagatccatattagctgcaaatacctgctgtttaagctgctgcattatgccgcctccgtcaggcctgcgcgggccatccgcgctttcacccagtcacgggctttcgcgacttccgccgccgggtcatcggtggtttcgctccacatctcaatcagatacggaccgcagtagcccgtctgcttgagcgttttgaagcaacgttcaaaatcgacgcccccttcaccaaacggcacgtttttaaagacgccgggcttcgtatctttgacatgtaccgccacgatatgccccatgccggcctgcaattccatctgtacgtcgttatcccacgccgataaattgccaatatccggataaagctggaaccacggattgttcaggtagtgggcataacccagcgccttactgatcgagttcatcagcggatagtccatgatttccatcgccagcgtgacctgagcccggctggccatctcgacgctctctttcaggccttcacgaaaacggcggcgcgtttcatcattcgcctgctgataataaacatcgtagcccgccagttggatcacccgaatccccacatcctgcgccagctgaatggctttacgcatgatatccagcccctgcttgcgcaccgcgtcatcttcgctgcctagcggaaaacgacgatgggcgctaaggcacatcgatggtacccggacgccggtttcggctaccgccttgaccagcgcgaggcgctgctcctggctccagtccagccgggcgagacgggcatcggtttcatcaagcgacatttcaacaaaatcaaaacccagcgctttcgcaagctgtaaccgctccagccagcactccccggcggggagcgctttttcatagataccgagcggaatttgtttcgacaacataaccgctccttaaccccacagctgggcgatagagcgtttaaactggcgagccgcttccaccggcgaggcggcatcgcggatgctgcgcccggcaataaagacgtgaatagggataccggcgaacagcggcaggtcttccagcgccagtccgccggtcacggtgactttgaagcccatatcggaaaggcgcttaatcgcgctgatatccgcctcgctccacgccacgcccgcggcctgcgcgtctcggctgcggtgatagaccacctgctgaatacccgcatcacgccacgcctgcgcctgctcccaggtccagaagccggtcagttcaatttgtacgtcgccattgaactctttggcgacatccagcgcccctttggcggtgttgatatcggcgcagcagatcacggtcacccagtcggcgttggcttcaaagcacatccgcgacaggattttaccggcatcggcgattttggcatccgccagcacgattttatgcggatacagcgctttcagatcgcgcaccgcgcgcaccccttcgccgacgcagagaatagtgccgacttcaatgatatccacctcttcggcgatcagccgggtggtctcataggcgtgagacagggtttggttatccagcgcaacctgcaacattggtaactgagacatcgtatcaactccctcttaaacagccgccgcagtggcgttttcaattaaatccagcacttcctgctcggtgcggcaggcgcgtaaacggtcgaaattggcttcgtcatcaaacaggttaacgatctgcatgatgcccacctcctggtgggtggtggcgtcaactgccgccatggtgatcagaatgtcgaccgggtcgttatcttcgtgattgaaaattagcggttttttgagcgtcaccagcgcaaagccggttttcttaacgccctcttccggacggccgtgcggcatcgccagccccggcgcgataacaaaataggggccatgctgagcgacgccatcgaggatcgcctggtagtaacgcggttccactacgtcggcggccaccagcagatcgacgccgattttcaccgcctcctgccagctttccgcctccgcctgcaggcgtatggagtggttctgcgccagagaatcatgaagtttcatggcggctccttatttcacatcctgcgggaagtgggctttgatcacttcaagcagttttgggccgaaatccgcaggcgacagcatattgcgcacgccaaccacgtatttattgccagtgacggtgatttcgccggcgatgtgggtcgaggcaatgatgatgtccgcgccgtttagttcgcttttatactcacctaccgcgcagctgttcaccgtgtggtcgatgtttgattgcgtcaggaactggtccaccttcattttcatgatcatggaactaccttgcccgttgccacacacagccagaatacgtacggtcataatcagaactccttattgagcagaggcttctgccagttgtttttccgcgtcttcctcggcgcgcagcgcgcggccggcgaagaacatataagccagtgaaatcagaataatgacggccataaacgccagccctatcgaggcgaagccctgcatcatcggcggcgccaggattgaccaatccgccatgcccatccaggcgctcattccggtcaacttcaccgcccacacgcagccgaagatttcaatcatgcccatcaccagacagattttgagcgccgcgcgccagccgccgaagtggttagcaaagacgccaatcgtcgcgttagagaagaacattgggataaagcccgggatgatcaggatggaggaaccaacgccgacgagaatacccacggcaatcagttggccgatggtgccccacataaagccccagaccacggcattcggcgcgaagctatagatagcggcgcagtcgatcgccagcacagcgccggggatcaggcgctgagagatgccgttaaaggcttcggacagctcggcgacgaacatacgcacgccctgggtaatgatgaaaatagccacagcgaaggagaaaccggtctgcaggatatagaccgtccagtgggttttgcccgccatcgcctgtacaacgtcgatgccaaaggagagcagaatggcgccaaagaaaatggtcatcacaatcgcggtagagacgatgttgtcgtggaagatattgagccaaccgggcagtttgaggtcttcgacgctctcctcttttttccccagatacggcgccactttataggcaatccacgaggcaaactgctgttggtgcccgatagagaagccgcaaccgtcggtaaccagttgagtcggcttgaacatcatgttggaggtgatcccccagtacagggagaccagtaccgcggtacagataatggtcgtccacatggagtagccgaaaatgaagaaagagaccgcaatcagccccgcctgctgaaacatgatatggccagtcagcataatggtgcggatgccggtaatgcggcgcagcaggacgtaacagatatttagcgccagcgccaacagcaccgcataccccacccagctataggcttcacccatccggtcgatggtcgccatcattgaggcgtaggtgtcggaaatcgcgccattgatgccataaacctctgacattttcgccaccaccggcttaaaggtgctggtaagaatgcctgagccggcttgtaacagcatgaaaccaatgatggttttgatcgtgcctttgataatcacgctgacgcttttacgcaacaagatatagccaaggcaggtcacgatacccagcagcagcggggcattagtcattacctgattaaagaagacggtaaagatgttgtagaggatctccataacacactccagaagaggaaggctttgaacgcgcatgacgctcagcagttgtcgtcgccctcactctaataatcaaaaacaatcacaacaagattgaatttgattaaatgtgacgcatcacgcaaataatcacattttttatgtgtgtattttccattacgtcatatcacaaccaaacaaaccactaatatcaataatatacatacatccatgatattaaattcagggcttatcagcacgttagcgcaacgatatcagcgctttttatcgaaaatagccgattgcattcctgaaaaaacagtgacaatatcaatcaaaataaatcaccaattgattgcttttgaaataaaagaggaagagatagatgagtaaagtgcaaaccatcacccgtgaatcctggattttgagcactttcccggaatggggcagctggctgaatgaagagatcgaacaagagcaggttgcgccgggcacctttgccatgtggtggctgggatgcaccggtatttggcttaaatcggaaggcggcgctaatatttgcgtcgatttctggtgcggcaccggtaagcagagccacggtaatccgctgatgaaaaccggccaccagatgcagcgcatggccggggtgaaaaaactgcaaccgaacctgcgcactacgccattcgtgctcgatcctttcgccatccgtcaaattgacgccgtgctggcgacgcacgatcacaacgatcatatcgacgttaacgttgccgccgcggtgatgcaaaactgcgccgccgatgtgccgtttatcgggccgaaaacctgcgttgacctgtggattggttggggcgtgccggcagaacgctgcatcgtcatgaaaccgggcgatgtggtgaagatcaaagatattgagatccacgcgctcgacgcattcgatcgtactgctctcattaccctgccagccgatcaaaaagccgccggcgtgctgccggacggcatggaccaacgcgcggtcaactatctgttcaaaacgccgggcggcaacctgtaccatagcggcgactcccactactccaactactacgcgaagcacggcaacgagcatcagattgacgtcgccctcggttcctacggggaaaacccgcgcggcatcaccgacaaaatgaccagcgccgatatcctgcgcatggcggaatcgctgaataccaaagtggttatcccgttccatcacgatatctggtccaacttccaggccgacccgcaagagatccgcgtactgtgggagatgaaaaaagatcgtctgaaatacggcttcaagccgtttatctggcaggtcggcggtaaatttacctggccgctggataaagacaatttcgagtaccactacccacgcgggttcgacgactgctttaccattgagccggacctgccgttcaaatccttcttgtaaccgtattccggcgggcgcgctcgccggaattccctttccgcattagtatttagcgttgatttcaaatatcatctttgcttgtcacttttaatcggattcgctcatgactgaagcgcaaagacatcaaattttactggatttgctggcgcaaacgggattcgtcaccgttgaacaggtaatttcccgtctcggcatctctccggcgacagcaagacgcgatattaataagctggatgaaaacggtaagctgaaaaaagttcgtaacggcgcggaagccatcagcgaacagcgcccacgttggtcgccaatgaacattcatcaggcgcaaaaccatgatgagaaagtgcggattgcccgcgccgcctcgcagctggtgtcgccgggcgaaagcattgttatcaactgcggctccaccgccttcctgctcggccgcgaactatgcggcaaaccggtgcagatcatcaccaactacctgccgctggccaactatctgattgaccaggagcatgacagcgtgatcattatgggggggcaatataaccacagccacttcatcaccctcagcccgcagggtagcgaaaacagcctgtatgccggccactggatgttcaccagcggcaaagggttaaccgccgagggattgtacaaaaccgatatgttgactgcgatggccgagcagaaaatgcttaacgtcgtcggcaagctggcggtactggtcgatagcagcaaagtcggcgaacgtgccgggatgctattcagccaggccagccaaatcgacctggtcattaccggtaagcaggccgatgaaacgatcctcaagcagcttgaggatcagggcgtgcaggttattcgcgtttaaagatgccgcagaaaaaaggcggtggtcgcgtccagcgcttccggggtaatgcgatgacgcacgcccttttgccagtgacaggtcaggttagttgccaggccgctctgcgttaacgcctgctgtaggcggaaagtgtcgccgggcggaaccacatcatcggcatcgccgtgccacagcagcaacggcttatcagccactgccgccagctgatgagtgacgtcccactccgccaggcttgccgtatcgaattcgggcgacggaaacaacgtctgtgcaagggtgctgaaatagcccgagcccatcaggcaggccacgcatttaagctcaggatgatgggtcatgatgccgagcgcggtcatgccgcccattgatgcgccggccaccgacagccgctcgtcttccaaccacccctcagcgataatcgcttcccgcagtgcggcaaactcaacaaagttttgtcgcaggatcggccaaaagcgcagcattcgcccggcatcatcgccgtgaaaacgcgcgccatgttcggcggcatccggcataatcacccggaagccggcttcggccagcgcgacggcaaagtagctgtagaccagtttggaagaggtaaaaccgtgatagaagacgataaccggcagcggtttctccgccatcccagccggacaggcgtgaatcacttcaccgcccgccagattgcgcatttcgagtgttatcatttatcgtctccttctttatagtggcatcacgcaatgcaccaaaagcaaccaccaaaattctgcttttgccgtgaattataatgttgagagctcggttacgctttcataacattttcattcgaaaatcgcgcgatagataacaattcgggaacattccccagaaatgatgttcaggctaccactacactatcactatcaggaaacgagatatggtcatgcgtaggtttacaccgtggttactggctctcgccttaagcggatgtagtgtcctgcagggtacgccggaggcaccgccgccggcaagcgatcatccgcaggagattcgtcgcaatcagactgagggcctgcaaaagataggtaccgtcagcgtgctaatgtacggttcgccgatggatgtcgagaccgcgttgaaagccaaagcagaagccgccaaagcggattactacgtcatcgtcatgatcgatgacaccatggttcccggccagtggtattcgcaagcgattctgtatcataaatagcagcgtgatgcgcttttaatcagctttacactgctttgcgtccattcacgttctcctgcgcataataacgttcggccagccttttggcagaacgttagcaaacggactgccctcgggattacgtgaaatggagctgacgatgaaacgatcactgaccttacccagcctgttgctgaccaccgcgacggccaatacttccgctcagtcagccgaattcgccagtgcggattgcgtcaccggcctgaacgaaattggtctgatttccgtcaataatatctccggcagtcagcaggatgtcgagcacgccattgccgtaaaagccgatgagcagggcgcttcctggtatcgtatcgttcagatgtatgaagagccgcagccggatagctggcgagtgcaggccattctctacgcctgagacggctgtcgtccgcgccccattgctcgcagcagcgcatcgtcaagcagttgagcgtccaggcggacacttcctcgcggatccagcatcattcggcaccatgcctgggccagcggcggcgacgcaaagcgcagcatctgcgcacccgcccccaggcaatacaccagacgcgctatttctcgtccctgcgcctcaacaggtcgccgtaagagttgctgaagctgtcgccacgcgcggtcataatgccggttctgccccttaacctcagcacactccgccgccagcatttctagcgccgcaggctgcttgctaagtacccgcatcacgtcgagacacataatattgccggagccttcccagatactattcaccggcatctcacggtataagcgcgggagttcgctctcttcgcaataaccgataccgcccagcacttccatcgcctcagcgacaaacggtataccagcgcgacagatagcaaacttggcgaccggggtaaataaacgagcccatagcacttcatgcgcatcgtcgcgccgatcccaggcgcgagccagacggaacagaaaagcggtttgtccttcaagacgcagcgccatctggcccagcacctgacgcatcatcggctgatcggccagattcttgccgaacgcctgacgctgcagcgcatgatacagcgccaccgagtaagcgcggcgcatcagggcatggctgccggcggcgcagtcgaagcgggtcagcgcgcccatcttgagaatttgccgcacgccgtcgccttcttcgcctatcagccacccgcaggcgtcaaagaattcggcttcgctactggcgttagagcggttgcctaatttatctttcagcctctccaggcgaacgccattgcgttggccatcgggtaaaaagcgcggcacaaagaagcaggagagcccacccgacgcctgagccagcaccagatgcgcgtcgctctgcggcaccgagaagaaccatttatgccccaccagccgatagaatccttccgccgttttttccgcccgggtggtattactgagcacatcggaaccgccctgtttttcggtcattcccataccaatcagcaacccacgcttctgatcgccgggcgccagatgcgggtcatagcggtcgctgagcaacggcggcagccagtcgctaaagacggtgggcagcgcgcgctgtagcagcggcgttgcggcgaaggtcatggttatcgggcataacgttcccgcctccacctgggcatgcagcataaagcgggcagtacgggcaacaaacgaacccgcgcgggcatcctcctgccaggcaagattatgcacccggttggcgcacagtccctgcattagcaaatgccaggcggggtgaaaccgcacgtcatccaatcgggcgccggtggcgtcgtagcgtagcagttccggcggattactattggccagacgccccaactccagcgattccgccgtgcctaactgctggccgatgctggcgagcagatcgctatcccagccggcgccttcacgcgtcactgcctcacaaagcgcggtatcggacaaaaacagattactgttacacaacggcgtcggttgattgaatacggtatgcgtttgccagtgcatgatgtctccctccgtcaatggctctgacagtaagtatggtcggccgcatagacgctcacaaaaaaaccgctccgccttcgtgaagcccatcacaggcataagaatttaaaattttctcattaaaaatgtatggaataatttattcattcgttactgttttgtatcagtcggggcttcctatgcacaccgccagcacaacatcggcagcgcaaaaacgcgcgctgatcgccggttctatcggtaactttattgaatggtacgagttcgcggtctatggctttctggcgaccgtaattgcgaaaaattttttccaaatgactggagaagcgccgctgaccgggctgattctgacttacgcctctttcgcgatagcgttcttctttcgcccgctgggcgccatcgtttttggccgtctcggcgaccgcatcggccgcaagccgacgctgattatcgtgttggtactgatgacgctcgccaccacggctatcggactggtaccggtttacgccagcatcggtattgccgcaccgttcattctgaccggattacgtattcttcagggattgtttgccggcggcgagtacggaggtgcggtatcgctgatgaccgagttcgcccctaaaggtaagcgtgggctgtatggcgcatggcaatcttttaccgtcgcgctggggctgctggcaggcgcaggcgtggtcgcgctgatttccgccgcgcttagccccgaatcgctgcatgactggggctggcgcatccccttctttctcgccataccgatgggcatcgtcgcgctgtggctacgcgttaaaatggaagagacgccgggctttttacgtcagcagcaggctacaccgcccgcggaaacccgcgccagtttgcgccagacgctcaaagcgattctcaccggcattggccggctgatggtatggtcggcggcgggttatacctacctggtgatcatgccctcataccttcagtccgcgctgcacaccggttttaatcaggcactgctgattgcggtgatctccaatattggcttcgccatcaccatcttgcctgccgggatactcagcgataagtgggggcgtcggcgggtgatggtcgcggctgcggtattgctgctggtactggcgctaccgctgctgaaaatattgcaggcggaaagcagtacgctgctggtgaaaggtatcgtggtgctgattgcgggtggcctggtggggattctggccgggcctgggccggcgatgctggcggagatgttcccaaccagagtgcgttataccgggctgggtttagcctattcgctttcgaatgctgtcttctccggctgtgccgggttgattattaccggcctgattaaacagaccggtaatctggatattccggcgtactacgtgatggcgacggccgtcgtcagtattgccgcgctgatgacgctcaataagaacgatcatttgcgggcgctggacgactaacctaccgcgcccgcggcggcttagctgcgctggcgcaccgcttcaaacaggcaaataccggtggcgacggagacattcagcgaagagacgctacccgccatcgggatactgatcagttcatcacaatgttcgcgggtcaggcgacgcataccttcgccttccgcgcccatcaccagcgccatcgggccggtcattttgctctggaacagcgtatggtcggcttcgccggcggtaccaacgatccacacgttttcttcctgcagcagacgcatggtccgcgccaggttagtgacgcggatcagcggcacgctttccgccgcgccgcaggcgactttcttcgccgtagcgttgagctgagcggaacgatcgcgcggcacgatcaccgcatgcacgccggcggcgtcggcgctacgcaggcaggcgccgaggttgtgcggatcggtgacgccgtcgaggatcagcaggaacggttgatcgaactgcgccagcagatccggcagatcgttttcctgatactgacgtcccggcttcacgcgggcaatgatgccctgatgcaccgcgccttcgcttttctcatcgaggaactggcggctggcaacctgaatcaccacgccctgcgcttcaagggcatgaatcagcggcagcagacgcttatcctcacggcctttcagaataaaaacttcctgaaaacgctcaggtgcgcgttccagcagtgcctgcaccgcatggatgccgtaaatcatttcactcattgatgtactcgttttaggttctgttatccgcccccttcaccccaccccagcaggcttcagggtgaagggacgtcaatcactcggcgttcttcttttttgccgcgcgcttggctttggttgccgcggcgattttttgcgttttcgccgacggctttttcgctttcttctcgcctttcggtttggctttagctttctctttttccttgcggaaggcgctatccggctcgaagtttacctgcttgccaacctggcgacgacggccgccgccgtttttacccggcgcgcccttcttcgctttttcgcgtgcggttttgccgacattacgcgggccgcgttcactggaaatcaggctgaaatcaatcttacgctcatccatattgaccgcttcgacgcgcacttccacgcggtcgcccaggcggtaagtctggccgccggactcgccaatcagccgctgccctacctggtcgaagcgatagtagtcattatccagtgaggagacatgtaccagaccatcgataaacagatcgttcaggcggacgaagaagccaaagccggtgacgctggcgatcacgccggagaaggtgttgcccacctgatcctgcatgaagtcgcacttcagccagtctgacacttcacgcgttgcttcatcggcgcggcgctcggtcatcgagcagtgctcgcccagctgcagcatctcttccatgctgtagtgccagccgccggtctcggtgctattgcctttatgtccctgctctttcgccagtaaatacttaatagcgcgatgcagcgacaggtcaggataacgacggatcggcgaggtgaagtgggcgtatgactgcaacgccaggccgaagtggccgcggttttccggatcgtagaccgcctgcttcatggaacgcagcagcatcgtctgcagcatttccgcatccgggcgatcggcgatggaagtcaacagctcggcgtaatcgcgtggctccggcttgttgccgcccggtagttccagccccagttccgccagcacggtacggaaggcggtaatcgcttcggtgcttggcttatcgtgaatacggaacagcgccggctcctgcgctttctcaacgaaacgcgccgcggagatgttcgccaggatcatgcactcttcaatcagcttgtgcgcatcgttacgctgagtctgttcaatacgctcgatacggcgctcggcgttgaagatgaatttagcttcttcactttcaaatgagataccgccgcgctcttcacgggcgccatccagcaccttgtagaggttatgcagctcttcaatatgcttcaccaacggcgcatagtgctcgcgtagctcctgatcgccctgcagcatatgccataccttggtgtaggtcagacgggcgtgagagctcatcaccgcttcatagaatttaaagccggtcagccggccttttgacgagatcgtcatttcgcagaccatacacaggcgatcgacctgtgggttcagcgaacataggccgttggacagcacctctggcagcatcggtacgacctgcgaagggaagtagactgacgtcccgcggctgcgcgcttcgccgtccagcggtgtaccggggcgcacgtagtagctcacgtcggcgatagccacccacagtcgccagccgccaccgcgttttttctcgcaatacaccgcgtcatcgaagtcgcgggcatcttcgccgtcaatagtgaccagcggcagagagcgcaaatcgacgcgcccggcttttgcttcttcgggcacctgctctttgaggccggaaacctgtttttccaccgccggcggccagacgtaagggatctcatgggtacgcagcgccatatcaacggccatgccggtgcccatattgtcgcccagcacttcaactattttgccgaccgctttggtacggcgggttggacgctgggtcagctcgaccaccaccacgtagcccatacgcgcgcccatgatctcttcaggcgggatcaggatatcgaagctaagacggctgtcatccggcaccacgaagcctacaccggcatcggtgaaataacggccgacgatctggctggttttcggcaccagcacgcgaacgatgcgcgcttcgcgacgacccttacgatcggcacccaacggctgggccagcacctgatcgccatggatacacattttcatctgctcagatgaaagatacaggtcgtctttgcgcccttcgacgcgtaaaaagccgtagccgtcgcggtggccaataacgacgcctttgactaaatcgagacgttccggcagcgcatagcactgacggcgagtgaacaccaactggccatcgcgttccatcgcacgcaggcggcgacgcagcgcttcggtttgttcttcgccctcgatatttaactcaatcgccagctcatcacggctggccggtttttcgcgtttggttaaatgttcgaggataaattcccggctcgggattggattcgcgtacttctcagcttcgcgttcctggaatggatcttgtgacatatcggttcctccgttgtcatctccgatgaaagtctctgggtggcgcacgccgccgctttgtgagttctctttacgctgcggcgcgaatcactcagcgcttttcttccaccagtaataatttatatagcggttgattcttttcaaccaaatcggccagcgtgtagttatccagttccttcaggaaactttgcgcggcttcggcaagtgcctgtttcaggcggcaagcgggagtaatgtggcaaaattcgctgctgcaattcaccagcgatagcggctcaagatcgcgcacaacatcacccacgcgaatcattttagctggcttgccaaggcgaatccccccattctttccccgcacggccgtcacgtagccagcacggcttaactgattgattattttgaccatatgattacgggaaacgccatagacatccgtcacctcggaaatactggtcattcggtcatccggcaacgacgccatataaatcagcgcacgtaatccataatcggtgaaactcgttaactgcacatcaacctcagggtaaggggaaagcggtgaatccgcgggtattaactctattgatgataaaccagccagcgctcaggccgctaatttatttgaaatggggcgggcgaactgcaaaaacaagggcgcccgaacggcgcccctggatgatgattatgcgtcgaacgggtcgcgcagaatcatagtctcagtacggtcaggaccggtagagatgatatcaaccggcacgccggtcagctcttcaatacgctggatatagttcagcgctgcctgcggcagaccgctgcgctctttcacgccgaaggtggtttcggaccagcccggcatggtttcgtagataggctcgataccttcccagttgtcggcagccagcggagtggtggtcacttcacggccgtccggcatacggtagccgacgcagattttcacttctttcaggccgtccaggacgtccagtttggtcaggcagaagccggacagggagttaatctgcaccgcgcggcgtaccgcgacagcgtccagccagccggtacgacgacgacggccggtagtggcgccgaattcgttaccctgcttgcacaggaactcgccggtttcatcaaacagctcggtcgggaacggacccgcgcctacacgagtagagtaagctttgatgatacccagaacgtaatccacataacgcgggcccaggccggagccggtcgccacgccaccagcagtggtgttggaggaagttacatacggataggtaccgtggtcgatatccagcagcgtgccctgcgcgccttcgaacatcacgaagtcgccgcgctgacgcgcctgatccagcagatcggagacgtcaacgaccatgctggtcaggatgtcggcaatcgccatcacatcgtccagcactttttgatagtcgaccgcttctgctttatagaagttcaccaactggaagttgtgatattccatcacttctttcagtttgtcagcgaaggtagctttatcaaacaggtcgccaacgcgcaggccgcgacgggcgactttatcttcgtaagccgggccgataccgcgaccggttgtaccgatagctttcgcaccgcgtgctttctcacgcgcaacatccagcgcaacgtgatagtcgagaataagcggacaggcttcggacagcagcagacgctcacgaacagggataccacggtcttccagacctttcatctctttcatcagcgcagccggagacagcacaacaccgttaccgatgatgctggttacattctcacggagaatacctgatggaataagatggaggacggttttttcaccgttgattacgagagtatggcctgcgttatggccaccctggtagcgcacaacatatttagcccgttcagtcaggagatcgacgatcttccctttaccttcgtcaccccattgggtgcccagtacgacgacgttgttacccattttttcaaaatcaccgtttgcttaaaaatggattctaccatcgctttttcagagttacagcactttttgcactcaaaatgagggtaattcgattgttttttgatcagccaatcgatttcctcaacatgtagtagatgacgataccagctaccacaagaccgccgccaaagcgacgcaataaattatcaggcagttggctcatggtcgctaccatcttgcgccaggcgcggggataaagcagtgggccaagaccttcgagaactaaaaccagcgccagtgccagccaaattgttgcattcattattgatgacccttatagaaaaacaaaaccgccgccagtttggcgccggtgagtattaccgcaaaacccttttctttcttcacattctccggcatttcacaggcaatatgaaaccactagctgagagaaaaatcacaatctatggcatgaaaaaaggcgcctcttgcaaggcgccttctgatttcacactgacccggcttatttacgcacagaatccggtgacttcatgtaacggaagaaatcgctatccgggctgaggaccatcacgtcctggttgctctggaagctcttctcataggcgcgcaggctacggataaaggcatagaagcccggatcctgactgaatgcatcggcaaacagttttgccgactcggcatcgccttcaccgcgcagaatacgcccttgacgctcggcttccgccagggtcttggtcacttcatagtccgcggtcgcgcgcagtttttccgcttcttcctgaccttgtgaacgatggcgacgagcaaccgcttcacgctcggcgcgcatacggttgtagatcgcttcagacacttcagccggcaggttgatctgcttgatacgtacgtcaacgacttcaatacccagcgccgccatactgttcgggttgattacctgaaccttaccgttagtttcagcttctacccgttctgccgctttagcgatagcatcatcggctgccggcgtcgagacttcatcttctgtacctgcagaaccggagttcaacgcatcacgcacttccagggtcaaacgaccgcgggaatcagtcacgatgtctttcacgtccagacgaccaatctcagagcgcagacggtcagagaacttacgcttcagcagaacttcggcctgggagacgtcgccgccgccggtcgccagatagtaacgactgaagtcactgatgcgccacttgatataggagtcgacgatcaggtctttcttctctttagtaacaaagcggtcagcctggttgtccatggtctggatacgcgcatccagcattttcacggattcaataaacgggatcttgaagtgcagacccggcgcatacaccagcggcttgttctcatcgtcgcgcagaactttgccaaagcgcagcgtaatgccacgctcgccttctttcaccacgaagacagacatgtagagcactaccagcacgacgacaatgatcgcgataacagatttacgcatcgttattccccctgacgctggtagtcgttacgctgcgcgttggcgcggcgttggtccataatggtacccccagttgaactcgaggttgatgaggtgctggcgctgcttgagctggacgcaggcggcaggcgcagcagatcgcttgcgccactgctatcgctctttgccggcgcaccagtggcgcctttcagcatctgatccaacggcagaaccatcaggttgccgcccttgctgtcattaaccagcactttgcgggtatggctcagcactttttccatggtttcgatatacagacgctcgcgggtaatttccggcgcggctttatattccggcaggatcttcgcaaagcgagcgacttcaccctgtgcttccagtacggtctgggttttatacgcacgcgcctcttcgaggatacgctgcgcctgaccgttcgcacgcggctgaacttcgttggtataagcttccgcttcgcggatgtactgctgctcgttctcacgcgcggcaatggcatcatcaaacgcggccttcacctcttccggcggacgcgccgtctggaagttgacgtccagcagggtaatacccatgttgtacggacgaatggtctcttccagctcgcgctgggtatcgctacggataacggtacgaccttcggtcaggatacggtccatggtgtacttaccgatgacgccgcgcagggcgctgtcggtggcctgacgcagactatcgtcggcgctggtcacgctaaacaggtagcgctccggatcggtcacccggtactgtacgttcatctcaacgcgcacgacgttctcatcggaagtcagcatcacaccagatgcggccagctcacgaaccgactcgacgttcaccgcttgcacattatcgacaaaggttggtttccagttcagacctggctcaaccagatggctgaacttgccaaagcgtgtcaccacaccacgttccgcttccttgatggtatagaaaccgctggctgcccagataatcaccgccgctgcagcaacgatgccgacaatgcgcccgcccatcgggccgcgcggcccctgcgtcacattaccgccaccctggccgcctttaccgccgccgagaccgccaagttttttgcttaacttgcggaagatatcatccagatcgggcggcccctgatcgcgaccgcctttgttgccatttccctcagagttgccgccattcttgctgcttccccacgggtcgcggtcctgtccgttattaccgggctgattccacgccatgtatatgctccatatttgtttttgatatccccacaggggttaatatcttcaggccaggtcaaaccacgtagtcgaccaacgcaggctcttgtttgcagaggcgacgccagtccacgatgggcatgcgcacttgcaggcttacgctgccgtcatcctccatccactctttttctatcgcctgaagctgatagaaccggcttctcagacgaccttcctgcggcggtaaacgcagcgtatgctgagccacttcgccggaaagacgttctgttaacgcctgaaaaagcagtggtacgccaactccggtctgggcggagagccagacccgaatcggtttattctcttcatcccgatcgatgcgcggttcaaaatcgtcaagcacatcgattttgttcatcaccagcaatgacgggatttcatcggcctcgatttcagcaaggaccgtatttactgcatcaatattttcctgcacgcggacatccgccgcgtcgataacgtgcagcagcagcgtcgcctgacgcgtctcctgcagcgtcgctttaaacgccgccaccaaatcgtgcggcagatgacgaataaagcctacggtgtcagccagtaccgtttcgccgacgtcggtgacgttaatacggcgcagcgttgggtccagggtggcgaacagttggtccgcggcatagacttccgcttcggttatctggttgaacagcgttgattttccagcgttggtatatcccaccagcgagacggtagggatatcggccttagcgcgtgaccgccgaccttgctcgcgctgcttttctactttttccagtcgcgacaggatctgcataatacggttacgcagcaatcgacggtcggtttcgagctgggtttcacccggtccgcgcaaaccaatcccgcccttctgcctttcaaggtgggtccagccgcgtaccagacgggtggccagatggcgcagctgcgccagctcaacctgcagtttcccttcgtgggtacgcgctcgctgggcaaagatatctaaaatcagaccggtgcgatcgataacccggcattcgcaaagctgctccaggttacgttcctgggccggactcaaggcatgatcgaacagcacgaccgaggctccggtcgcttttacggcttccgcaatttcaacagccttaccttcaccaacaaaatacttcgggtgcggtgctttacggctaccggtaatcacctgcattgcttcgacaccggcggaagagaccagggattcaaactcctggagatcctccatatctttgtcttgcgaaaaatagatgtgtaccagtaccgcctgctcaccggcatcataacggtcaaacaagcgtaaaccccttataaaataccagcggggaacgcagaaaacctggctccccgacgtggaaaaacagcattagccttattcggcgtcgtcgctgtcttgctgcggcgcagaagaaccttgcgcgctaccaccgtggtgatagttgtttgcaccgccgccagcattattgctgtggtgagacaccggacgggacggaacaacagtagaaattgcgtgcttatagaccatctggctgaccgtgttcttcaacaggatcacgaactgatcgaaagactcaatttgcccttgcagcttaataccattcaccaaataaatagaaaccggaacacgttcccgacgcaaagcgttcaggaacggatcttgtaaagattgccccttagccattctctcttttccttatatgtatgcttgttttgtactcagaaccttacgattcttaaaaaaaattacgcacgataccattcaattgtacacgttcagttctggctagcaccaacaacctgtaatactttgttgagcgcttgttcaggttgctcactgtctaaccagtgaacatcttcccaaccacgcagccaggtgacctgacgtttagctaactgtctcgtcgcgcaaacacctcgataaaccatttcatcatacgggacctcgccttcaaggtatgaccacatctggcggtatccgacacaacgaatggaaggcatatccgtatgcaaatctccacgggcaaatagcgcccgcacttctgcttcaaaacctgaagccaacatctgatgaaaacgctgctcaatgcgttgatgtagcagttcacggctcgccggggcgatggcgaactgatgcacctgatacggcagagcctctcctgacgtttgcgtcagttccgttaaagttttacccgaaatgaaaaaaacttccagtgctcgggaaagtctttgcggatcatttggatgaatacgcgcggcggccacgggatcgatctcctgtaactgccggtgcaatgcgtgccacccctgctctgctgcttgttgctcaattctggccctgactgcgggatccgccgaaggcagcggcgataacccttccaacaacgctttgaagtacaacattgttccgccgaccagcagcgggatgcgcccggcggcgacgatatccgccatttccgccaacgcatcgcgacggaaatccgccgccgagtacgactctgccggatcaaggatatccagcaaccgatgcggcgcagcgctaagctccgcggcatcgggtttggccgtgccgatatccattcctcgatagatgagggcggaatcaacgctaatcaactctactggcaaaactttacgcaaggcgatagctaatgcggttttaccggaggccgtcggccccattaaaaaaattgccttaggcaggctcgcctcagttacatcactcatctttcagggctgtcattgccgaatgtaaatcaacaggttgtaacagaccacccggcggcgctttaatcagctgcggacataaacgctcaacgtccgccaacacggaaatcgcctgcgccatactccactgcgcgtgctcgctcgccagattacgcgccatccactgggcgatgtcgccgacgtcgaatgccgttagctgcgccaggtagcctatcagttcaggaatcaagatttgtaaattttgttgtcttaagggtaaaggcaccgcgcggaccgtcacgtgctgggcatctgcttgtaaatcgatgcccaattgcgccagcgccggctgcgccttttccagcgccttacgttctgcttcactcactttaaggcgtagcgggataagcagcggctgcgcgcaaaccgcttcagcgcccggcgttagctgcgcctgacgcagccaacgctccgccaccggcagcgccagcaacgccaatgtgccgccgcgctcgagcagcgcgcaatcgctgccgataatagtcagcacccggccaaagctttggctgtgggctgccaggctttccgcaggcgccggcgcaacgggtggcttttccgccgccggggtttgcagcagttgacggtaaagcgccccctgctgtttttgatagcccggctgcgcgtggggccagttggcgccgcctgcgctatagccgccgccggcggcggcagattcacgcggcacgcggatatcataacccgccgccggttcccgggcaggcgatgggcgagcgaaatggttagcgcccgccgctacgcgattttccggcaccggccgcgacgcgggcgcttcgtcttcttccgccaacggcacatccagttgctgctgcagcacgctcagtacgccttgatagataaaatcatgcaccagccgcgattgatggaaacgtacttcgtgcttcgccggatgcacgttgacatcaacctgatgcgggtcaatctccagatacaacacaaacgccggctgctggtcagcgcccagcttgtcttcacaggcctggcgaatggcatggttgatcagccggtcacgcatcatacgcccgttgacgtagcagtactggatttccgctaatgccggattggtatgcaacggatcggcaacccagccgcgcagcgtcagatcgccatgctgccactcaatggccaacgcgtgttccagaaacgccgcgccgcaaatcgagccgaggcggcgttcacgcgggccgccttccgccactgcgcgatactggcgcatcattttgccgttatggctgagattaatcgttacatcgaaacgcgccagcgcgatgcggcggacgatttcatcaatatgattaaactcggttttttcggtacgcatgaacttgcgccgcgcgggggtgttgtaaaacagatccaggacttccagcgtggtgcctatcggatgcgccgccggtttcaccgtcactgcctggtcgcgcccttcagcataagcctgccatgcctcgtgctgctccgcggtacgcgaagtcagcgtcaggcgggcgacggaactgatactggccaacgcttcgccgcgaaagccaaggctgatgatcgcctcaaggtcatccagcgaggcgattttactggtggcgtgacgagccagcgccagcgccagctcatcttttttgatcccacagccgttatcgcgaatacggataagcttcgcgcccccgcgttcgatatcaatgtcgatacgggttgcgccggcatcaaggctgttctcaaccagctccttcactaccgacgccggacgttccaccacctcgccagcggcaatctggttggcgagctgcggcggtagaacctgaatcggcatgaccttctccttagttaatcaacgtcccgccaggcgaactggcgctggcggtttgcgcagccgtgccgcgcggcgctgattgcagcgggtgctgcatataatagttacgcagccctttataaatcgcctctgcaatctgctgttggtaatcatcgctgcccagcaggcgctcttcgccgttattactaataaagccggtttcgacgaggatcgacggaatatccggcgagcgcagaacgccaaggctggcatgctccgggcggcgtttatggagattaccgacccgctgcagctggcttagtacatccgtcgccacatcataaccgacgcgctgggaatggccgaactgtaaatccagcaccgcctggcttagataaggatccgactgactatttgccagcacgtcgcccgcaccgcccaaaagttcggattgtttctcatgctgttctagccagccggccatttcgctattcgcgcggcggttagagagcacccacaccgatgcgccggtcgcgtcgcggttcggggccgcatcggcatggatagagacaaggaaattggcgttttgtttgcgcgccacgtccgaacgccccataaccgagatgaagtagtcgccgttgcgggtgagcaccggtttaaactgcggatcgtcgttgagcaacgcccggagtttatgggcgatagcaatcgtgacgtttttctctttggtgccgcccggtccgatggcgccaggatcctggccgccgtgaccggcgtcaatggcgataataattttatcgtcagaagagacggtacgcgccgccggacggctgatggtctggttgttagtcatcgccggctgactgctggtcaccaccgtagttctgtcgctgccagagtttttaaacggattgcgcggcggcgtgctcggacgcgacgccactaccggcgcttcgacccgtttcgctatcactggcggaggaggtggcggcggcacatcggcgttaatggtaaagacgacggtatagttggcgccattttgctgcttcaccgcccgcgttttaccatcttccgtcagatcgaccaacagacgcagcgattgcgtatcctgaggcgagccggaacgaatgctcttgaccagattattaccgctaaactgcagcggcagcccctgaagtacgccggtttgtttgatatccaacgccaccgcccgcttaccttgcggggtgaaagaatattcaggatcgccgacaaaacttagcgtgatgcgggcctgccgatcgccgtttgagacctggatatcggataaacttgccgcggatgcctgagtgccgagcagcatcagagcggcggccagccaactggttatacgatacttcatcccgtcatcctttaggctaaatggctaaacgcgccaataaagactcacccaatgaagagaccgccgttacgcgcgcctcacgcccttgcgcctgataatccaggtgaatttcgacatccgggtcaggcagtacacccgcaccttgttgcggccattctaccaggcagatggcatcgttagcgaagtaatcgcggatccccataaattcgagctcctcaggatccgccagccggtagaggtcgaagtgatacaccatcagattgtcgagggtgtaaggctccaccagcgtatacgttgggcttttgacattgccgcggtggccaagggcctgcagaaaaccgcggctgaaggtggttttacccgcgcctaaatcgccatacagatagataaccgtcgcgccgctacaggcctgcgctacgcggttgccaaggtctaatgtcgcctgctcgtcgggtaaaggaatcacacggttaatcatggtctaggtcaatcacatccgggttaacaacacgcctcagcgtgcaaaaaagatcggtcgccagcatcccgcgggcgccatctctggcggccagccggtctgcggcttcgccgtgcgccacgcagcctgcgcaagcggcatcatatggggtcagcccctgtcccaacagcgcggcgataatgccggtgagcacatcgcccatcccgccgctggccattccgggattaccggcatcaatgataccgatttcccccgcgttattcgccacgacggttcctgcgccttttagcaccaccacgccgccataccgttttaccagacgttgtacagaatgtaagcgatcgctttcaacttctgccacgctgatattcaataaacgggcggcttcgccaggatgcggggttaacacgcgattgtgacgtttatcgggattgattgccagcaggttcaacgcgtcggcatcccagaccatcggtttgcgaaaattctctacctgccgcagcgccgctttaccccattcgctttgcccaagaccgggaccaatcgccacgacatccgcccactccaggctctcggcaagagagtcaccgttcagctcatggaccatcaattccggtctggcagtcacaatgcccgcgatattttccgccctggtcagcacgcgtactaaacccgcgccggcacgcagcgcggcctcacctgccatacgaatggcgccagcggtgccacgatcgccgccgataatcaccagccgaccatgcgagcctttatgcgacgtcgggcgacgcggcggcaaccagcctgccagttgcgctgcggaaaaacggcgaatagcggtgttttgcccggcaagccagcgctccagcccgagcgcatgatgatgtaagcgcccgacgacgtcgcgggcgttgccggtcagtagtccgggttttagcgcgataaacgtcagggtatgggcggcgtggattaccgcgccaggcgtcgcgccggtttgcgcgttcagcccggaggggatatcaagcgcaataaccggcgcgggataggcattcgccagttcaatcagcccggcgacgttagcgcgcggcgcgctatgcaggccggtgccgagcagcccgtcaataatcaatgagatatcatccggccagccgctatcggcggcgtggatgacgccgccggcattgagccactcttcccgcgcggcctgcgcctcttccggcagcggcttatcgctttccaacgccagtagcgttaccgcgatgccctgcgcctgcgccagtcgcgcgacgacatagccgtcgccgccgttattgccgtggccgcaaagaatcaaccagtgctggctggcgggataaaggatgcgggccagttgaaacgccgcctcgccggcacgccgcatcaattcaaaaagcgtcagcccgagactatccgccgcctctctttccgcctggcgcagcgtctccgctggccatacgatgtgtggtatactgtcagggtttttcgtcattgtatggtccatcatgtcacagcccctcgatctcaatcatttagcgcaacaaatcaaacaatggggcaccgagcttggcttccagcaggtcggtattaccgataccgatctcagcgccagcgaacctaaactacaggcatggctggataaacaataccatggcgaaatggaatggatggctcgccacggcatgatgcgcgcccggccgcatgaactgctgcccggtacgctacgcgtgattagcgtgcgcatgaactacctgcccgccaatgctgctttcgccagcactctgaaagatcccacgctgggttacgtcagccgttatgccctggggcgtgattatcataagctgctacgtaaccgcctgaaaaaactcggcgagatgattcaggaacagtgtgcttcgctcaattttagaccgtttgtcgattccgcgcctatcctggagcggccaatcgctgaaaaagcgggccttggctggacaggtaagcactcacttatcttaagccgcgaggccggatcgtttttcttcctcggcgagctgcttattgatcttccgctaccggtagaccagccggttgccgaagagtgcggacgctgtgtcgcctgtatgactatctgccccaccggcgccatcgtcgagccctataccgttgacgcgcgacgctgcatctcctatctgaccatcgagctggaaggcgccatcccggaagaatttcgtccgcttatcggcaaccgtatttacggctgcgatgattgccagttgatatgtccgtggaaccgtttttcgcagctcaccgatgaagaggacttcagcccgcgtaaagcgctacatgcgccgcagctgattgagctgttcgcctggagcgaagcctggttcctgaaagtcactgagggatcggcgatacgccgtatcggtcacttacgctggttacgcaatatcgccgtcgcgctcggtaatgctccctggaatgaagccaatctggtcgcgctggaaagtcgccgaggtgagcacccacttctcgatgaacacattgaatgggcggttgcgcagcagatcgaaaagcgaaacgccaacgttatcgaagtgcagttgccgcagaaattacgcctggtcagggtggtcgagaaaggattaccgcgcgacgcctgattcattcacaggctgtgaataaaaacaaaaacacattgcgtttcaacgggcagacgtacgtcaagtgatcgaattaacagtttgaaatgaaatttaaatgttaaatttcaatcagatacgacaatactatttacaaagtgaagcatttatcgcgccgtcagccaaacgacagcctgtggataactctgtttacagtatttttggataggcaatgaaaatcatccccggcgcgatttcgcactgtggataaactggataaaggaagaaatttggagcgggaaacgagactcgaactcgcgaccccgaccttggcaaggtcgtgctctaccaactgagctattcccgcttacatcggttttcaatctacctgctggtaacctgaaaactatgctttggtatggtgtgtctttcaaattttggagcgggaaacgagactcgaactcgcgaccccgaccttggcaaggtcgtgctctaccaactgagctattcccgcttacattggttttcaatctaccttccggcaacctgaaaactatgttttggtatggtgctgctttcaaattttggagcgggaaaacgagactcgaactcgcgaccccgaccttggcaagggtcgtgctctaccaacggagctatttcccgcgtacctgctttttttgccatatttcggatggccgtcccaatttgcctttctgcgtcgttccgggaggcgcattatacgagaattcgattcacctgcaaccccctggcgagcactttttttcgttttttgtttgaatggacattttctcgccacacagcccactgaattgtataaataaccgccataattagcaaaatatctttttacccccgcgcgaatggcgcaaaatcgcccgcatgacaccgcggaggttatccgcgaaaaggtccaccatgacgacaatcagggattcagaatgaaaaaagcgcttaccgtcctgctgctgaccacatccttcatcggaacggcttctgccgagacgctccattttggcaccacaaccgccaatccgccgtttgagaccgtcaaaggcaaaggccaggcaacgggtttcgacattgatttggccaatgcgctgtgtaagcagatgcaagcggaatgcaaattcacgccgcagcgctttgataccctcattccggcgctgcgctttaaaaagttcgacgccattatcgccggcattgaagtgttgccgatgcgtgaaaagcaggtcgccttcagccaaccttatcgccaggagctatccggcgtggtagtcacggcaaaagacgccgcccacgggtttgccgacctgcagggtaaaaagctcgccgtcgtcaaaggtagcgtccaccagcgttatctacgcgataaacaaaaaggcattcaaaccgtcgcctttggcaacgatagcgacgcgctggcggcgttgaaaagcggcgaagtcgacggcgcgatcggcgatttagcgacgatggaccagtggctggcggataatcctgattacgccgagatgaaagaacgcgccaccgacccggcctactacggcaaacaatatgccatcgcggtacgcaaagacgatccggagttgcttaagcagattaacgacgcgctggaggtggtaaaagcgtcgccggagttccagcagatggaacaaaagtggtttaagtaacacatcaaaaagaacggggccatgtcggccccgtttacgcttcagagcttaataaaatgctcgcgataataggctaactcggcgacggattcacggatatcgtccatggcctggtgagtgccctgctttttaaacccatcaaggatttccggcttccagcggcgcgccagctcttttagggtgctgacgtcgagatagcgataatggaagtaagcttccagttgcggcatatatttgaacaggaagcggcggtcctgaccgatgctgttgccacaaattggcgatttccctgctggcacccactgcttgagaaactcaatagtggccagttccgcttcgcggtcgcccacggtactggccttcacgcgatcgaccaggccgctgccggtatgagtgcgcacgttccattcgtccattagcgccagctgagcatcagactggtgcacggcaatggtcgggccttctgccagaatattcagattcgcgtcggtgaccagggtggcgatttcgataatgcgatcgcgctcgggatccagccccgtcatctcaagatcgatccaaatcaggttgttttcatctgcactcatgctattttccacccttcttgcgtgactatattcatctaaaatagcgtgtatcatagaggttttgccccatcagggcgaccaggagccagttcgattgagtaaaaataagctctccaaaggccagcagcgccgcgtcaaggccaaccaccagcgccgcctgaaaacgacttcggagaaggccgactacgatgacaacctgtttggcgagccttctgaaggtatcgttatcagccgttttggtatgcatgccgatgtcgaatccgcggatggcacgacccaccgctgcaacattcgccggaccattcgttctctggtaaccggcgaccgcgtggtctggcggccaggtaaagacgcagccgacggggttaacgtcaaaggtatcgtcgaagcggtacatgaacgcgcctcggtgctgacgcgcccggacttttacgacggcgtgaagcctatcgcggcaaatatcgaccaaatcgtggtggtttcggccattttacccgaactgtcgctcaatattatcgaccgctatctggtggcctgcgaagcgcagaatatcgaaccgctgttggtactgaataagatagacctgctggacgatgacggcatggccttcgtcaacgagcagatggatatctatcgccagatcggttatccggtattgatggtgtccagccatactcaggacggcctgaagccgcttgaagaggcgctgaccgggcgcatcagtatttttgccggccagtccggggtgggtaaatccagcctgctgaacacgctgctgggactgcgggatgagcaaatcctgacgaacgacgtctccgatgtgtcagggctcggccagcacaccaccaccgccgcgcgtctttatcacttcccacacggcggcgatgtgattgactctccgggcgtgcgcgagttcgggctgtggcatcttgatgcggaacaaatcaccaacggctttgtcgaattccatgattatttaggccattgcaagtatcgcgactgcaagcacgacaccgacccaggttgcgccattcgcgaagcggtagaaaaaggcgctatcgctgaaagccgtttcgccaactatcaccgcatcctggaaagtatggaacaggtgcaggtaaaaacgcgtaaaagcttttcatcaaccgacgactgacatttaagctgtcgtcgctatacgtactcgctttgccagcacaacggcgcggatacaattcgctgaagtttacgtatagaatcgtcccccttttcagtaccccgcgccaaagtggggtcaggaacgacaattaacggcctggaggctaccttgttaaactcgtttaaactctcgctacaatacattctgcctaaactgtggctcacccgcctcgcaggctggggggcaagtaaacgagcaggctggctgactaaactggttatcgatctgttcgtcaaatactacaaggtcgatatgaaagaggcgcagaagccagataccgccgcttaccgcacctttaacgacttcttcgttcgcccactgcgtgacgatgttcgcccactcaacaccgatcccaacgtgctggtgatgccggctgacggcgttatcagccagcttggcgctatcgaagatgacaaaattctgcaggctaaaggccacaattacaccctggaagccctgctggcgggtaactaccagatggctgacctgttccgtaacggtagcttcgccaccacttacctgtcgccgcgcgactatcaccgcgtgcatatgccgtgcaacggtatcctgcgtgagatgatctatgtcccgggcgatctgttctcggtaaaccacctgaccgcgcaaaacgtaccgaacctgtttgcccgcaacgagcgcgtcatctgcctgttcgatactgaattcggcccgatggcgcagattctggtcggcgcaacgattgttggcagcatcgagaccgtctggtccggcaccgtgacgccgccgcgcgaaggcattatcaagcgctggacctggcctgcaggcgaaagcgaaggctccgttgcgctgctgaagggccaggagatgggtcgctttaaactgggctcaactgtgattaacctgtttgcgccgggccaggtgaagctggttgaacaactgcaaagcctgtcagtcaccaaaatcggcgagccgctggcaacggccgtagaaactgatatctccgtggaacctgcgccgttgccggaagaagagatccgcgccgaacaccgcgccagcccgctggttgacgataaacaagacgaaggttaattcctgacgacaaagggttacgccgtgcgcctgatatacacttttctgttggccttgagcctcagcttcggggcgtacgcagcgacggccccggacgtcaaacaaatcacccaggaactggaacaggcgaaggcggcgaaacccgcccagcctgaaaccgtcgaagtcctgcaagccgcgctgaatgcgcttgaggagcgcaatgcctccgttgagcgcgctcgccagtaccaggacgtcatcgataatttccccaaactgtttcaaactctccgcgcccagttagcgaatgtcggcgatacgccgcaccaggtgcctaccgctctcaccgccgacgcgctgaatcaggagatcctgcaggtcagcagccagcttctggaagctagccgccaggcgcagcaggagcaggatcgggcgcgggaaatcgccgactcccttaatcaattaccgcagcagcaaaccgacgcccgccgcaagcttaatgagattgaacgccgcgtcggcgcgcagcccggcaatacgccgctggcgcaggcgcaaaatctcggtctgcaggcggaatccgcgcgtctgaaagcgctggtcgacgagctggatctggcccaactctccgctaacaaccgccaggagctgtcgcgcatccgctctgagctggcgcagaaacagagcgaacaactcgatgcctacctgcaggcgctgcgcaatcagcagaacagccagcgccaacgcgaagcggaaaaggcgctggagagtaccgagctgctggcggaaaacagcgaaaacctgccgccggggatcatcgaccagttcaaaattaaccgcgagctatcgcaggcgctcaaccagcaggtccagcgccttgatctggtggcctcgcagcagcggcaggcaaccaatcaaacgctccaggtgcgccaggcgctgaacaccctacgcgaacagtcgcagtggctgggatcatcgaatctactcggcgaagcgcttcgcgcccaggtcgcccgtctgccggagcgcccgcgcccacagcagttagatactgaaacggcccagttgcgcgtgcagcgcttgcattacgaagacctgctcagcaagcaggcgcagctacggctgattcgccaggccgacggcgaaccgctcaccgcggaccaaaaccgcatcctgcaggcgcaactgcgcacccagagcgagctgcttaactcgctgctacgcggcggcgataccttgctgctcgaactgacgaaactgaaagtcgccaacggccagttagaagacgcgctgaaagagattaacgaagcaacccaccgctatctgttctggacctcggacgtcagcccaattggcttctcctggccgctggaagtggtgcaggatctgcgtcgtctgatctcgcttgataccatcaaccagctcggcaaggccagcgtcatgatgctgaccagcaaagagacgctgttcccgctgtttggcgcgctggtgctggtgggcttcagtatctattcgcgccgccactttacccgcttccttgagcgctccagcgcgcggattggcaaggtgactcaggatcatttctggctgacgctgcgtaccgtgttctggtcaattctggtggcttcgccgctgccggtattgtggatgacgctcggctacggattgcaggcggcctggcccttcccgctagcggtcgccattggcgacggcgtgaccgccaccgtgccgctgctgtgggtagtgatgatttgcgctaccttcgcccggccgaatggattgttcatcgcccacttcggttggccgcgtaaccgcgtcgccaaagccatgcgctactacctgatgagcattggcctgattgtgccgctgataatggcgctgatcatgtttgataacctcaacgaccgcgaattctccgcctcgctgggccgcttgtgcttcatgctgatatgcggcgcgctggcgctggttacgctgagcctgaaacacgccgggatcccgctgtatcttgataaagcgggcgacggcgagaacatggtgaaccgcctgctgtggaacctgctgctcggcgcgccgctaatcgcgatgctggcggcggcggtgggctatcttgccacctcgcaggcgctactggcgcgactggaaacctcggtcgccatctggttcctgctgttggtggtttaccatattattcgccgttggatgttgattcagcgtcggcgtctggccttcgatcgcgccaaacaccgccgtgcggaaatcctcgcccagcgcgcccgcggcgaagaagataccgcccactccaccagcaccgaaggctcggtcgaagcggaagtcagcgaagtcgacctcgacgccatcagtacccagtccctgcgcctggtccgctcgctgctgatgctgatagccctgctgtcggtgattattctgtggtcggaaattcactcggcattcggcttcctcgaaaatatctcgctatgggatgtgacctccacggtacagggcgtcgaaagtcttgagcctattaccctcggggccgtactgattgccattctggtgctgattatcaccacccagctggtgcgcaatctcccggcgctgctggagctggcgattctgcaacatctggatttgacgccgggtaccggctacgccatcaccaccatcaccaaatatctgttgatgctaattggcgggctggtcggcttctcgatgattggtattgaatggtcgaaactgcagtggctggtggcggcgctcagcgtcggtcttggttttggtctacaggaaattttcgccaactttatctccggcctgatcatcctgtttgagaaaccgatccgtatcggcgatacggtcactatccgcagcctgaccggtagcgtgacgaaaataaatacccgcgccaccaccatcagcgactgggaccgcaaagagatcattgtgccgaacaaagcgttcatcaccgaacagttcatcaactggtcgctgtcggattcggtcactcgtgtggtactgactatcccggcgcccgcggaggccaatacggaagaggtcacgcagattctgttgaccgccgctcatcgctgctcgctagtgattgataccccggcgccggaagcgtttctcgttgacctgcagcaggggattcagattttcgagctgcgtatttacgccgccgagatgggacaccgtatgccgctgcgtcatgagctacatcagctgattctggcgggttaccgcgcgcatggcatcgacatgccgttcccgccgttccagatgcgtctggaaagcctggatggcctacgcagcagccagccgctgaactcagcgggtaaaagcagccgtacgccaggaagtttgtaagcactaactagcccggtgagcgcttcaccgggcattctctttcttaaccctccgccagcgctacctgtaccgccgttctctgacgatagttctcgtagatccctagcgccagtagcgagaagaaaatcggcccgccgaccatccacagcgtactgttccagtcgccggaatccatcaccggctgaataacggtgaagatattggcgaacgctaccaccagtaccactatcgtcgtcgccagcagcgtacttatgcggcttttgaacatcacaaagggacgatcgagatcggctttggccttaaagaacgggaaagcgatcgccaggaacagatacggcaaggtcatcgagacgttcgccatcagcgtcagcttgttataaaacgccgaggcggtatcgccgccgaaggagaccagcagaataaacagactcaccagcagacactgcagccacatggcgttagccggcatgccgttggcgttgactttggtcatcatcgtcggccacagcgctttcggcgtcccctgaataatcgccttcagcggcgaatagctcagggtgaagaatgcgccggtataggccaggaacatcgacagcccggtaatgcgtgcaaaccatacgccggtcagcgccgccgcctgcggcgacagatgaagcgcttgcccaagcgttgcgccaaggctggtcatcaacacataggtgatattgccgaggttggtactgtggttgctcaatacctgctgccagttggcgctgacgccccacagcacgatggccagcgagtagccgatcgaaatcaccagcgcggcgataataatgcctttggcaaagttcttttccggcttcacggttttatccaccagcccgccgaccgcttcaatcccgccataggcgaaaatggcgaacaccacgaaagagagcatcgccagccccgattgatatcctgggttcggcgacgccgtgaaatccagcggttgtgcgaaatggccgccgttcagcagcagaatcgccccactcaccagcagcagtaccagattcaggcacatcaccgcgataccgccgacggcggtaattttggcaatcttatttatccctttcgccgctaccagcgtcaccagcaccatccagcaggcggccagcacgccgacggtttgcgtcgaggttaagccggcaaaagcccagctctgggttttatccgcgccgaagagaaaggtcgaaaaagggacccaaattttcgccgcggtgctgaccatccacaccacataagaggaaaaccacataaaggtgccgataaacgcaaagcgcggcccgacgctgcggttcatccacgaatagatcccgccctcttccttacgatatgccgagcccatctccgccatcattaaggcgaaaggaataaagaaaaacagcgccgagaaaagataaaacggcatcgcgctataacccatcagataaaacgccgaagggctgttggcaaagccaaacaccgaagtaaagatcattaatatcagcccaatcaggctcatcttcttgatttgttgaggcataaatcgatccaaacgtgagcgtcgccgaacggcgtcgccaggtaagcagaaattgaacgcggatcctagcaataatccagtttgaaattgtggttattagggctaatgcagcggggagaactgtaaaaatctttgaatgaaggggaaaacgctaacggcgggaaacagcttccctctcctcatgaaagggaagcgcagttcatcaggcgcgatcgacggtgaatgagatcacttcgccgatggtctctacacctaacgccagcatcaccaggcgatcgacgcccagcgcgacgccggaacaatccggcaggccggcttccagcgcagccagcagattatagtcgatgggctgctccggcaggccgcgggccgcacgtttgcggttgtcctgctcaaaacgctgctgctgttcgcgcgcgtcggtcaattcatggaaaccgttcgccagttccatccccttgtagtagacctcgaagcgctcggcgacgcggtgatcttcggtgctgatctgcgccagcgaagcctggcttgccgggaagtgatagacgaacgtcggacgttctttaccgatgtgcggctctacgcccatggcgaacagcaactgcagcagcgtatcgcgatcttcttccgtatcagcgatattactgagatcgagctttgccgccacttcgcgcagctgggttttatctgccgagagcggatcgatctccagatagcgctggaaggcctgttgataagagaggctttccgcgggttggcactcgagcacctgctgcagtaaatcgtcaacttcgttaatcagacgatacatgtcgtagcacggacggtaccactccagcatggtgaactctggattgtggtgacggcccatctcttcattgcggaagcttcggcacagctgaaataccggcccgcacccggcggccagcagccgcttcatgtggtattccgggctggtcatcagatacagattcagaccctgagagtggccggggccgacgaaacgggtttcaaacgggaacatgtggatatcggtcaccgttgcctgactcatacaaggcgtttccacctccagcacgccgcggtcggtaaagaaacggcgaatttccgccattacagccgcacgttttaacagatttggaatggatgcgctcggctgccaggttgccgtctcgctcatggtacttttctccgatttcatacaagggcacgaagtctactcgcaaccgtcgagtgaaacaaattttgtgcaatccggcggcgatattacatcctgataatttattgctaacttaattgcataaataaaattgataaattagcgcacggattgataaaaaaatcgaacgcgtcaattttccccaccatccctatggctatactcatttacctataaaggagcagtgatactttttcgccagcccggcggcgaaatacacaaaaactggaggaatgtcgtgcaaacttttcaagccgatcttgtcgtcattggcgcaggcggagcaggtcttcgcgcagccatcgccgctgcgcaggctaatccaaaagccaaaatcgcactgatttcaaaagtctatccaatgcgtagccataccgtcgccgccgaaggcggttctgcggcggtcgcgcaggatcacgatagctttgaataccattttcacgacaccgtcgccggcggcgactggctctgtgaacaggatgttgtagactatttcgtacatcactgccccacggaaatgacccagcttgagctgtggggttgcccgtggagccgccgcccggatggcagcgtcaacgttcgccgcttcggcgggatgaaaatcgaacgtacttggttcgccgccgataaaaccggcttccatatgctgcataccctcttccagacctccctccagttcccgcaaattcaacgtttcgacgagcacttcgtgctggatattctcgtcgatgacggccaggcccgcggcctggtggcaatgaatatgatggaaggcacgctggtgcaaattcgcgccaatgcggtcgtcatggctaccggcggcgctggccgcgtctatcgctataacaccaacggcggcatcgtcaccggcgatggcatgggcatggcgctgggccacggcgtcccgctgcgcgacatggagtttgtccagtatcacccaaccggcctgccgggatcggggatcctgatgaccgaaggctgccgcggcgaaggcggtattctggtgaataaaaacggctatcgctacctgcaggattacggtatggggccggaaacgccgctcggcgagccgaaaaacaaatacatggaactcggcccgcgcgataaagtctctcaggccttctggcacgagtggcgcaaaggcaacaccattccgacgccgcgcggcgatgtggtttatctggacctgcgccatcttggcgagaagaaactgcttgaacgcctaccgttcatctgcgagctggcgaaagcctatgtcggcgtcgatccggtgaaggagcccattccggtgcgcccgaccgcccactacaccatggggggtatcgagaccgaccagcagtgcgaaacccgcatcaagggcctgttcgccgtgggcgaatgttcctccgtcggcctgcacggcgccaaccgtctgggatccaactcgctcgccgagctggtggtctttggccgccttgccggtgagcaagctatgcagcgcgcaatggccgcgggcgaagccaacaacgcggcgctggatgcgcaggtcaacgacgtggaaaaccgtctgaaagacctcgtcaaccaacaaggcaatgaaagctgggccaaaatccgcgacgaaatgggtatgtcgatggaagaaggctgcggtatttatcgcacgccggagctgatgcaaaaaaccatcgataagctggccgagctgcaggagcgctttaagcgcgtgcgtatcaccgacacctccagcgtgttcaataccgacctgctctacaccattgagctgggccatggtctcaacgtcgccgaatgcatggcgcactccgctatcgcgcgtaaagagtctcgcggcgcccatcagcgtctcgatgaaggctgcactgaacgcgacgacgtcaatttcctcaagcatacgctcgccttccgtgaggctgacggcagcacgcgcctggagtatggcgatgtgaagatcaccactctgccgccggctaaacgcgtgtatggcgccgaagcggaagccgctgagaagaaggagacgacccatggctgagatgaaaaaactgaaaattgaagtggtgcgctacaacccggaagtcgacaccgcgccgcacagcgccttctatgaagtcccttacgacgaacaaacctcgctgctcgacgcgctgggctatatcaaagataacctcgcgccggacttaagctaccgctggtcgtgccgcatggcgatctgcggctcctgcggcatgatggtcaataaggtgccaaaactggcctgtaaaaccttcctgcgcgattacagcaagggtctgaaggttgaagcgctggctaatttcccgattgagcgcgatctggtggtcgatatgacccactttatcgaaagtctggaagcgattaagccgtacatcatcggtaatgcgcgcacgccggatcaggggccgaataaacagaccccggcgcagatggcgaaataccatcagttctccggctgcatcaactgcggtctgtgctatgccgcctgtccgcagtttggtctgaacccggagttcattggcccggcggcgatcaccctcgcccatcgctacaacgaagacagccgcgaccacggcaaaaaggaacgtatggcgcagctcaatgcccagaacggcgtgtggagctgtactttcgtcggcttctgctccgaagtttgtccgaagcatgtcgacccggcggccgccattcagcagggcaaggtagaaagttcgaaagacttcctgatcgccaccctgaaaccacgctaaggagtgcactatgacgactaaacgcaaaccctacgtgcggcccatgacctccacctggtggaagaagctgccgttttatcgcttctatatgctgcgtgaagggacagcggtgccgacagtctggttcagcatcgtgctgatttacggcttattcgccctcaagcacggcgctgaaagttgggagggctatgtggcattcctacaaaacccgattgtggtgatcctcaacctaatcacccttgcagcggcgctgctgcacaccaaaacctggtttgagctggcgccgaaagccgccaacatcattattaaaggcgagaaaatggggcctgagccgctgattaaagggctgtgggcggttacggcgctggttagcatcgtgatcctgtttgtcgcgctgttctggtaaggaggctgatatgattaatcccaatccaaaacgttccgatgaaccggtgttctgggggctgtttggcgcaggcggtatgtggggggcgattatcgcgccggtgatggtgctgctggtcggcattctactgccgctggggctcgcgcctggcgatgctttcagctacgaacgcgtttacgccttcgcccatagcttcatcggtcgcctctttatctttctgatgattgttttgccgctgtggtgcggcttgcaccgtatccaccatgcgatgcacgacctgaaaatccacgtgccgaacggcaaatgggtcttctatggcctggcggcgattttaaccgtcgtcaccctggtcggcgtgttatttatctgatgcaacatctcgcccggtagcaatctgttaccgggctcgcttatcgacaaaatcgccctacttttttcctgccgctatctacacttagagaaaaagcggtaaggaagatacctatgcgtctgctgccagttctcaccgtggttatcgcgtcattgctgagcgttgcgtgcagcaatcccgttcctcccgctggcgtgaccgtcgtcagcccatttgaaagccaacgcttcctcggcacctggtatgaaatcgcccgcttcgatcatcatttcgaaagcgggctggaaaaggttaccgcgacttacagtctgcgcggcgatggcggcatagatgtggttaataaaggttataaccccgagcgtgggatctggcagaaaacagacggcgttgcctggttcaccggcgatcccaaccgcgcggcgctgaagatctctttcttcggccccttctatggcggctacaacgtgattgcgctggataaagagtaccgccatgcgctggtttgcggcccggatcgcgattacctgtggctactggcgcgcacgccgaagatttcgccacaggtgaaacagcagatgctggatatcgccacccggcagggcttcgacgtaagcaaactgatttgggttaaccagcgctattaatgcgcactgattttcagcccgataatgccgatcacaatacaagcgaggctcgcgatacgcatcgggcttgcggattcgcccagcagcacgatgccggttatcgctgcgccaacggcgccgatcccggtccacaccgcataggcggtacccaccggcagtgatttcatcgcccacgataacagcgccatactgacgaccatagcggctatggtaatcacacttggcagcaggcggctaaatccatgggtatatttgaggccgacggcccacacgacttccagcaaaccggcgataaagagaatgatccaggacataaggctccagtaatggggccgtccccggatgagatacgctcacgggtcgtcccgcaaggtggttgaaaacgtcgggattataaacaacggcgccggcaatgtgaagaccggtacggcgcgaggccgcaccggtaatgtttaattctgagctttggtcgccgcaccagagatagcgctgccgccgtcagaaatgtcttcaccgataccacgcgtggtgttacatgcagtgagcacagaagaaaggaccaaaacagtaaagaacgccgcaatcgtttttttcaccataatatcatccttataaacagtttttgttttcttgccctataagcatagccaaactgattcagaatgaagggatagtcgcgttttttaagagaaaaagaggttcaggcggaacttagcaagatgaattcagagaatgagaatgatctaatgaaatgagattagctaacggcgtgagaaatggcatgccccaacccctggatatcttcgccaaaaccgcgggcggtattgcatccagtaagcaacgcgccgctgagcagcagcaaggcaagaagtttgagcgtctggttcatgttagtcccggcgtgaaactgaaggcgcagcaaccaggctgcgcccaccgtctcaaagcatgaattacttcacgcgagatacgtattcgccggagcgggtatctactttgatgacttcgccgatctgaacgaacagcggaactttaaccactgcgccagtggacagagtcgccggcttgccgccagtacctgcggtatcgcctttcagacctggatcggtttcaacgatttccagttcaacgaagttcggcggcgtgacagcgataggctgaccgttccacagggtaacgatgcactcagcctgatccagcagccatttcgcgttgtcgccgatagctttagcatcagcagacagctgttcgaaggtttcgttgttcatgaagtgccagaactcaccgtcgttgtacaggtaagtcaggttcatatcgacaacgtccgcgccttctgcagagtcggtggacttgaaggttttttctacacgggtgccggtcagcaggcggcgcagcttaacgcgtgcgaatgcctggcctttacctggtttaacgaattcgctggcttcaaccgcatacggttcgccatccatcatgattttaagaccagcacgaaaatcgttgctatagtaagtcgccataaggccctctgaaattgtttaacttggtagctaagccacaaaatggcgcatattgtaaccctaaataccccatccagagaagattggatcacgcaacttgccgatgttgtgaccagtcccgatgaactattgcatcttttagatctggaaacagatgcaaacctattggcgggacgcgatgcgaagcgtctcttcgcgctgcgcgtaccgcgcgcgtttatcgcgcgtatggaaaaaggcaacccaaacgatcctcttcttcgtcaggtacttaccgcacaagaagagtttgttgcctccccaggtttctccaccgatccgctggaagaacaacacagcgttgtaccaggcctgttgcataaatatagcaaccgggcgctattgctggtgaaaggcggttgtgcggtcaactgccgctactgcttccgccgccatttcccctatgccgagaaccagggcaataaacgcaactggcaggcggcgctcgagtacatagccgccaatccgcagcttgatgaaattattttttccggcggcgatccgctcatggccaaagaccatgagcttgactggttgctgacggaactggaagcgatcccgcatattaaacggttacgcatccatagccgcttgccgattgtcataccggcgcggatcaccgaagggctggcggctcgctttaacacctcatcgctgcagatactgttggtcaaccatattaatcatgccaacgagatcggcccggagttccgggcagcgatggcgcggctgcggcaagcgcgcgtaacactactcaaccaaagtgttctgttacgcggagttaacgacaatgcgcaaaccctggcggacctcagcaatgcattgttcgacgccggggtaatgccctactacctgcacgtgctcgataaagtccagggcgcagcccacttcatggtagaagatgaggaagcacgggcgatcatgcgtgagctattaacgctggtatctggttatatggtgccaagactggcacgtgaaatcggcggcgaaccgagtaaaacgccgctggatttaggtttgaaacaacagccctaggcccctctctgccggccctgtccggcagatacttgaaaagcatattttccagttaaatataccactagttttccagccttcgcctgaatacagtgctttcttgagctttataattatatattaagtacaatttaaacgatgtagtaataatgcttctaataaaataacgaaaggatattagttacagccataattacgaacataagaataaaccacatgggtaatttaaatgctctatctcttttgttttcaatataattttggcgctcattgttatttatctctggcacactatcttctattgttacaactttttttattaagggggttatctggcaggtagacacttcttcctcagctttgacaaccggtacgatcaaggaaccagttgcaagaataaacccacgctgcctgacagtaacaatgatatcctgtgataatccagccttcagcagtgattttctgagcaatgatatgttttgataaaaagtattttgcgcgacgacaaccccccttgttttccagacagattccagaaattcttctcgagaaatgattcgtccattactttcaattaacaattgtagacaacgtgcagttggaccattcaagttaatgctttcaccatttccattaacaggtcgtaactcactcatattcacatcgaatatgacttcattattaataatgaactcgctaaatgccataatgcttttccttttattcattagtcacgtgaattaaacatgaagttaatgagattccatttttgaacttgagcaaatagccctaaacagccctgccgttagatagtttcacatctcaatcattggctctccattttcgaacggcgctaaggccaacgtgaccttttaacgaaaaggaagccaagtatattgtcgaacattcatcacgttaacgcaactactattcaaggagattaaaatgtgaaacgttcctcccatcattaaaataggttattcaattaaaattcacatgcattttacctgcttgccaattaaattcctcactgctcccgtcttacgctaattgcgggcaagtatctgcatattacaagggacaccaaaggagtaaagaacgggatagtgttaagactcagcgtcaattaacggttattcagtgatccgttaattaaaactgaggcaacatctatttcagggattacgtatttatacatggacaaataaatgaaaaaaacaatcgtagctgtaatggttgctgcatctgcagttctgagcgcacaggcaatggccgctaacactgctgaagtgaccgttcttggcgaagtcaacgactcctcttcttcttgcgtagtcaccccgactggtactctgaacaacggcatcgttcgtctgacttctgttaccaccagcgaagcgaatgcacagactgctaacgtcctgttcaaaagccagaagtttggttttgacgtttctgattgcgccaaaggcagcgaaaaaccagcaaccggcctgactgttgcagttactggtaccaccagcgccaacgcaacaattctggacaacaccgctgacgacggcgctgccggcatcggtatcggcatcgcgaaagccagcgatggttctcgtgtagccttcgatggttcccaaaccatggctgaaacctacactgacggttccgtcacttctctgaactactacgcgggttatgtgaaagtaaacgaagctaccaccgtaaccgaaggtccggttaaaggcgtagcaacctttactatcgactataccactggcgcttaattttaccccgaagggctcgctgtctggcgagcccttttttcgtttagagaaatgctatgttcaggaccttatttaaacttgtctttccctgttttttactgataagcggcattgcgcatgccggtatcgtcattgagtctacccgctatctttacaaagaaggctcccgtgaagtaacggcacaaatagagaacaaagacggtataccctatttaatcaagtcctggattgagaccccaaaaggacaaacgccgtcattcatggccacgccgccactgtttcgtctcgaagcaaaacaacaaaataccgttcgcctgttttctacaggtaatgtcgcggcgccagccgatcgcgaatcgatattttatttcaacgttatggctattccccccgctgatgatacgaatgctaaaaataataccatccagctggcggttcgccatcgtatgcgtctggtatttcggccaaaatcgctgtttgatatgaccccgaacaccgaagcggcaaaacttgaatggcgaaaatcaggcaataaattatcaattaagaaccctacgccatttttctattacttcaatacaataaaaatcggtaataccgaaattaaaaatgaagtgagttctgtcccgccgatggagaccaaggaagtcactttaaaacaaaatgtaaccgcatcaggtattacatggaaaatagtcaacgattatggcggagccggaacgctctattcatcatcgttgtaattggaagttgtttaaccttatagggatgtgtctatgcaaaataaaaataaagacctattcaaactatcagcgccaggaattgcattactggccgcgtttttttctggtttggataacaaagcgcaagcacgtgattttttcgatccctcattcataaactcattgaatggtagcgatccttcaaacgccccagacttatctgtgtttgaagccaggaacgcgcaggctcccggtaactaccgggtggacatcgtctttaatggccaatacctggataccaaaactataaaatttgtgattgataatagccgggccagcaccgctagcgatgagatcaaactggcgccctgcttcagtctcaaggacttatcgcaatatggtgttagagttaaagcattcacgaaattgaaagaagatgctaatggttgtactaacctgacggttattccagataccaaagcggattttgattttaacgcgcagcgtttaaatatctccatccctcaggcggcattatctaccgtcgtgcaaggatttatccctgaggatcaatttgacgacggaattaacgcgctactggtgaattaccagttcagcggctcggatgatttcgaatccgaagacgaatactatagtcttaacctccagtccggcttaaacctcggcccctggcgcatcaggaatctgagcacctggaataaaacaaaaggcgacgcaggcgactgggagtcggcgtacctgtacatgcagcgtagtatacgccccattaacagtaatttggtgatgggcgaaagctcctcgctttccgggatctttgacagcgttccgtttactggggtccaactcgcgacggatacctccatgctgccagagagcctgcgcggctatgcgccaattatccgagggattgcaaaaaccaacgccagggtgatcgttaagcaaaacggttatcaggtctatcagacctacgttgcccccggcgcctttgaaatcaccgatatgtatcccagcggcggtagcggcgacctgtatgtaaccgtagaagaatcagatggctcaaagcaagaattcatcgtaccgttcgccacgctaccggtcatggtgcgtgaaggccagctgcagtatgaaatcacttcaggtaaatatcgcccatatgatgacggcgtacatgaaacgccatttacccaggcaacggccagctacggggtgtccagtagcctgaccgcctacggcgggatgcagatggcctcgcattatcaggcgttgtcatccggtctcggctataacctcggcgatttcggagccgcgtcagctgacgtcacccaagcctggtcaaaaatgcaggatcgggaaaagacttcgggacagtcctggcgaatccgttatggtaaaaacatccttgataccggcaccaacatcaccatcgctggctatcgatactctactaagggatttaacaccttatccgaggtgctggatagttatgctaatgacggtcgctataccacccgttcattacgcaatcgcaccaacctgaccctcaaccaaagtctgggtaaaggcctgggcagcgtatctattagcgggctggttgaagattattgggatgataaacgcaccaacaaatctatcagcgttggctataacggcggctttagaaatgtgaacttctatctgggctatagctatagccgctatacctggagcaacaatagctccgacagcgacgcgcaggacgatcagcgcattacgttgaccgtcacgctgccaatcagcaactggctccctggcacctacaccagctatcagctcaccaatagtaaccccggctcgacggatcaatccgtcgctatcggcggcgtggggctggaaaacgatagcctggactggagtatccagcagggatatagcaaccgtgagtattacagcggcgacatgcgcgctacctataacggttcccagggcagcatcaatgccggttatagctacgatcgtgacagtcagcgcgtggattatggcgccagcggtagcattatcgcccacgccgacggtattacgttaggacaggacatcaccgatgccgccgtgctggttaaggctccaggcttagataacgtcaagctgactaccgatagcactatctcaaccgactaccgcggctatgccatcgtgccttacgtcaccccttatcgccgcactgatattacccttgatagcaccacgcttggtgatgatatggaactgccggaaacgacgcaaaccgtggtgccaacccgcggcgccattgtacgggccaactacgacggcaagatcggacaacgcgcctttattcacctgaaaacggctagcggtcaagacgttccttacggcgctatggtcttactggccgacgatgcgaaaagccaggcgagtatcgtcagcgacgccgggatggtctatatgtccggtctgcagcaaaccgggacgctcaacgtacagtggggaaaaagtagttcccagcaatgtaaagcccccttcacattacctccgcgggaaggcaaaaccgctggcttaaaccagatcgaagcggtgtgtcgctagccattatttaaggacgaatattgatgaagagaatgtttattctattaatgcttttagttatctgcggtgaggcgactgcaaaatgtagttactcaggcagcatccagcggcaagcatttactattagagcaaaaataccgacagacgactcaattccagtgggaagcatattatattcggctaaatacggcactggtaactataaaaacttctcatgtagccaaaaaactaacgatcagtatataactaccatcagtacaccagaagtagctggcgttacaggaatacagggaaagccagtatatgaaaccggaattgacggtattggattccagatatccgatcttctggaaagcaaaaatggcgcattagtgcctgctgtcgcgggctcagtgctagtaccatttgaaaatacgtcagataattactataaattcattaccgtgtggtttatcaaaaccaagcaggtcattgatacttcaggttcggactcaaacccatcaataagtttctctgtcggcaatcctaccaccaaccctggaactaatgacaaactattatatacaaccaatatcaagctaaaaaacaccaaatatcaggcaacctcatgtgacatatcaccatccagttcacaaataacgctcggccggattaaaaaaagcacgctaatgtcggtctcccgcggcggcgtcacgccagagcaaaagaatttcttattaaccattacctgccctgcaggttccatcgggaatactttaatgtactggtttaatccgataggcaccgcgagcacatctggcgatggtatcattgataatatgataaccgacgattctggcgccaaaaatgttggtatcattttcaaacaaactggcaccccgttagtcttttatgatatggatagctacagttttaatagtgccgcaacatcgcaggtgatcaatctcaccgctgattactatcgcaaaagcaatagtgttgacgacattacaaatggtagagttaaagcaatgttagaagtagttattcaggaacaataaaatcctcaaacagacatgaattctacatgaattcatgtctgttgagttgttaaaactacaaacctcatttacattttcttccgtcctataattaggccaaccagtaataatattaatttaaaggaataaatatgaaggaattaactgtatttgaaatggaagagatctccggtggttacacttgggatttctcatcagttacctccactatcacttcactagctagcaatgcggtagaggctcttgctattggaacattaggtgccattattgtgtcagccgtcggcacgtggattggtggtgttcaaggcggtcataatggtggtattttgggacttggcctacttggtaatgctgtaggggctgttgttggctttgttcttggtgctattaccggagctgctggagccgtcgcattcggttgggacaagtcaatggctattttccaggaatttatagatagtgcccttgatggtacctttgcaccgggatcttgataataatttcgcgcgttggaaaaagttccatacaataaacaaaggcctttaggcctttgttttatatccaatccaagccaaagtaaatataacttatcaatatgaataaaaatctctatcgcaaggaagcgatcgaatacaaaaggcatcactggaaagggaaagccttgttgctcgctggcttacccgcctggttaatcgccttattgtcggcattatttctcattgcgcttatctgcgcattgatattttgcaagtttacccagcgtgtcgatgttaaaggcgaagtcattaccctgcctcactcaattaacgtctttgcgccacagcaggggtttatcgtcaagcaattcgtaaaaattggtgacgtcgttaaaaaaaaccaaccgctatacgagattgatgtttcccgcagcaccaccagtggcaatgttagcgcggcacagatagaagttatcaatgaaaaaatcgccaactctgaagatattattaaaaaactggaagataataaaaaccagacgttaaatgcgctgaatgcgcagttgaaaactaccactgcctccctgaaggagaccaaccgtatgctggtcaacacccaggtaggcctgaagaaaatgcatgataacctttccagctacgataaataccttagcaacggcctgataacaaaagatcagtataactatcagcactctttatactttcagcagcagagtgcctaccagtctttagttagccaaaaaatgcaactcgaatcgcaaattacacaacttaatagcgatataatcactaaagctgctgattttgacaaccaaatttccagtcaatacaaccaggccaatgattataaaaatcagttagtggaatctaatgctaacggtaatattattatcaaatcgaccagcgatggcaggattgagtcactgtcggctacccaagggcaaaccgttgataatggaagtagcctggcccagataaaaccgaccggaaacgttgagtattatctcattctgtggctacccaacaataccattccgtatttaaaaacgggagataccatcaatattcgctatgatgccttcccatcggataaatttggtcaattcccaggaaaaattatatccatatcatcaatgccagcgtcacggcaagaaatgtctgaatacaccaacgtcagtaacggtaccaatcagcaacaagaactggcgctgtataaagcgattgtcaaaattaaagataaacagttcgaatatgacgggaaaaagctaagcctctccaatgggcttaaagcacaggctgttgtcttccttgaagaacgccctctctacatgtggatgtttactccggtttataagattactcaaagcgtgagcggcccgattcatgactaatgaactgtttgaaaaaattacggcgaaagttaatttttcaatactgaaaaaaacgccggtcatattgcaatctgaagccgccgagtgtggcattgcctgtctggcaatggtttgcggccattatggtctcgatatcgatctgttcaatttccgtcaacgctttggcagcccctcccagggggtaacgttgatgtcactgagcaaaacggcagaacatgctggcttaaaaagccgtgcgctgtcgctcgatcttgatgaaatcagacaattaaagctgccctgcgttatccactggggaatgaaccactacgtcgtgctcaccaaagtacgcaaatctagctttgtggttcacgacccggcgctgggtaaacgcattatcggcattcaggaaatgtcgaacaactttaccggcatcgcgttagagttatggcccgatcagaacttccagcaggaaaaagccaaatctcgcctgcgtttgttagatctgatgcgtaatattgttggcttaaaatcagcgctgctgaaaattttcgccttttccgtcgtcgttgaagcgattggactactgttgccaataggcacgcagttggtcactgaccacgtgatcatggcccacgatcaaagcctgctctcggttatctgtattggtctggtcttctttaccctcttccgcacctttatcagtatgctgcgcgcatggacttcactgacgctcaacacgctaaccaatattcagtggaaaaccactctattcgatcatttggctagcctgccgctggcatttttcgaaaagcgtcatctgggggatattcagtcccgtttctcttcgctggataccattcgctccacgttcactaatagcatcgtcagcggcattatcgactcgatcatgacgatcggcctgctgattatgctcaccctgtacggcggttggctaacatgggtcgtcgttggctttaccttatgttacgcccttatgcgtctgggaacttatcgcttctatcgccgcgttgctgaagaacaggtaatcaaaggcgcgcgctccagttcacactttatggagtcgctatacggtatttcgaccatcaaagcgctgaacctgaaagaacgccgctctcagcactggctgaatatcaacatcgacgcctgtaatgcggggatcaaacagacccgtttcgacatgatgtttagcggtatcaatacctttattaccgccatcgatcaggttgcggtactgtggctgggcgccattatggttattgataatgaaatgaccctcggtatgtttatggcttttaacgcctaccggggccagttctcccagcgcgcatccagcctggttgatcttaccatgcagctacgcatgctctcgctgcataacgagcgtctttcagagatcgtcttcagcgaaccagagcaagagctaccatcacgtgaagtcttttcgaaggatgccggcgccaggcttgaagtcagaaatctcagctatcaatacgatcccttttcgcagccgattttctcaaatctgaacatcaccgttgagccgggggaatccgtcgcgctggtcggcccgtccggcgtcggtaagaccacgctattgaaagtgatgtgcgggctgctctcgcccaccagcggcgacgtcttcgccgataatctcgatatccagaagataggtctaaataactatcgccacggaaccgcctgcgtgctgcaggaagaccgcctcttttccgggtcgcttatcgataatatcagcggttttgaagataacgccgatgtggattttgtcgtcgaatgcgccaaacgctgcaacattcacgacgaaattatgaaaatgccgatgggctatgaaaccatcgttggtgagttgggcctggggatttccgggggccaaaagcaacgtattttgattgcccgcgcgctttaccgtaaaccgagcattctgtttatggatgaggccaccagccatctcgatttacgaaacgagtcggttatcaaccagtctatttcaggcctcagtattacccgcgtcatcgtcgcccaccgcccgtcaaccatcgcctctgccgatcgggttattgatttatcgcagtcaagaataccaatgccagcgtaaggagaagagtatgcaaggaacgtttattggttttaacaccgccggaattacctacgaagaccatttcatggcgctgctgctgaaagtaaaacatcagaatggcatgtttcagacgtactatttgcaggcgccggtgctggctgacctgctcatggtcctggcaaaccggatgtctattttcttgcagagattacaacaggatggcgagaatgaggctcagaaagtggagcttcttgcctacaatgaaacgctaatagccaacacgccagagatagatatgttggaggtacaaaaccccaacccggagctgcgaatcatgtcgatcaccctgaaaccaggggaaacagaatcgacgctgatattaatgctgcagaacgagcaaatagcaactctacggattgatgaccgccaggtcgaagcgctgatattggggatccaacaatctctcaccatggccgcggacacgaaactgaatgaatatttagctttggctctggacttcgtactgctgtataccgtcgatttaacgacccaacctaatatcgagtaccagcaatacgctcaggaagagtggaagttgaatctgttcaaccatcatcttggcgtgctgtatagctacgagcaggaagagggtaaaaaagtactctctggcgcggtgattaaaaccagcgccgcgcatcagtcagattttgaaaaaagtatcgcgctacgtctgattgaaaagagccagaagctaaaacaagttcacaaccagcatacgccgcatcaaatcttcagcaaggtgattccatccgcaccgggacaaatgctgactaaggatgaatgcttaaagtcattgcacgaattctacgtggctaccaaagcagcgcttgaggcataaattgttaagcactctctgcgcaggcagagagtgcttaacgcatcagttcgggcacttataaacctggccgttcatctggctatcggtcgggacaaagctcgacagcagattttgcgtcgggctgctcacgccataaatgacgttaccgcccatggccgccgcctggttacgcagcgcattcgccgcgccgcgcatcgagccgccttcatcgccattctggcctgacagccagttgctttgcgtgccggttgccgtccctaacagctggcattccgttcccggtttatcttcaacaaaacgcacgctctggccgcctgcggttaattcgttgctggaactgcaacccgctaacaataaagctgcgccgacaatccctgctaaatattttacctgcatgttattccccaatgagctggacgcactggcccggatgtaaaccttatactaaaaagccagcaaaaagaaaaacccccagccatttctgaccgggggtttctgcatttttatgccgtatagcgcacgattacatcatgccgcccataccgcccatgccgcccatgccgccagcagcacctaagtcaggcgcgtcgcctttcggcaggtcggtcaccatgcactcggtggtgatcatcagaccagcaacggatgccgcgtactgcagcgcagaacgggtgactttagtcggatccaggataccgaagtcgatcatgttgccgtactcttcggtagccgcgttgtaaccgtagttaccgtcgcctgctttcacgttgttggcaacaacagacggctcttcacctgcgttggaaacgatctgacgcagcggcgcttccattgcgcgcagcgcaactttgataccgacgttctgatcttcgttctgaccggtaaggccagcgattttcgccgccacgcggaccagcgctacgccgccgccagctaccacgccttcttcaaccgcagcacgggtcgcgtgcagggcatcgtcaacgcgcgcttttttctctttcatttcaacttcggtagcagcaccgactttgattaccgcaacgccgccggccagtttagccacgcgctcctgcagtttttcacggtcgtaatcagaggttgcttcttcgatctgcttacgaatctgagcaacgcggccctgaattgcggcttcttcgccaacgccatcgatgatggtggtggtgtctttattgataacaacgcgtttagcctgacccaggtcttccagagtcgctttttccagctccataccgatctcttcagagataacggtaccgccagtcagggtcgcgatgtcctgcagcatagctttacgacggtcgccgaagcccggcgctttaaccgctgcaactttcacgatgccgcgcatggtgttaacaaccagggtcgccagcgcttcgccttcaacgtcttcagcgatgataaccagcggtttgccagctttcgctacggcttccagaaccggcagcatttcgcggatgttggagatttttttgtcagccagcaggatgaacgggctttccagttcaacagcgccggtatccggcttgttgatgaagtaaggggacaggtagccgcggtcgaactgcataccttcaacgacgtccagttcgtcttccagaccggtaccgtcttcaacggtgataacgccttctttaccgactttatccatcgcttcagcgatcagtttacctacggtttcgtcggagttagcggagatagtaccaacctgagcaatggctttagagtcagagcacggtacggacagcgctttcagttcttccacagcggcaacgacagctttgtcgataccacgtttcagatccatcgggttcatgcccgcagcaacggctttcagaccttcgttaacgatagcctgagccagtacggttgcggtggtggtaccgtcgcctgcagcgtcgttcgctttagaggcaacttctttcaccatctgcgcgcccatgttttcgaatttgtcttccagttcgatttcacgagcaacggaaacgccatctttagtgatggtcggcgcgccgaaggatttgtccagaacaacgttacggcctttcgggcccagggtgactttaactgcatctgccagtacgtttacgccgcgcagcatttttacacgagcgtcgttaccgaattttacgtcttttgctgccatttcttttattcctcaaattcgttcagggtcgtgcgaattacgcttcaacaattgccaggatgtcgctttcggacatgatcagcacttcttcgttgtcgatcttctcagacttcacgccgtaaccatcgttgaaaatcacgatgtcaccaactttaacgtccagcggctgcacagttccgttttccaggatgcggcctttaccgacagcgatgatttcgccacgagttgatttagctgccgcagaaccggtcagaacgatgccgcctgcagatttggtttcaacttctttacgtttgacgatcacacgatcatgtaacggacgaatactcattgatagctctccttcgagaaagtcattatcagttatggatggcgccgggccgtaaacggtttccgactagtgcagagagagatggggatggccatttacggcttcaaggggaaaattaaaaaaaaatttccgcctgtgcgctgacgcgcaaaaatattcccgcggcggctgcgctatctggcgcaaagggttgtgataacatcgtttttttgccgcgcgcagggttgagtcatgagtgggttaaaacaggagctggggttaggtcagggagtcgggttgctttcaacatcactactgggaaccggcgtgttcgccgtaccggcgctggcggcgctggtcgctggcgataacagcctgtgggcgtggccagcgctgattctcctggtctttcccatcgctatcgtgtttgccgtgcttgggcgccactttcccagcgctggcggcgtggctcattttgtggatatggcgtttggcccgcgtctggcgcgggtaaccggttggctgtttttatcagtcatcccggtgggtttacccgccgccctccatattgctaccgggtttggccaggcgttgtttggctggcacgatactcaactgctgcttgccgagctcggcacgctggcgatcgtctggtgggtgggctcgcgcggcgccagttccagcgccaatctacagacgctggtcgcggtaatgattgtcgcgctgatcgtcgctatctggtggcgcggcggcataaacccggcgcagatccctttcccggaacctaaagatgtcgacacgtcgcagctgtttgctgccctatcggtaatgttctggtgcttcgtcggccttgaagcctttgctcatctggcatcagagtttaaacgtccggagcgcgacttcccccgagcgctgatgattggcttattgctggcaggaaccgtttattggggctgtaccgtggtggtactgcattttcgcgccttcggtgcggaaatggcggcggcggcctcgctgccaaacatcgtggtacggctgttcggcgtgcaggcgctgtgggtcgcctgcgtgatcggctatctcgcctgcttcgccagcctcaatatctatatccaaagttttgcccgcctggtctggtcgcaggcgcagttcaagccggaaggttatctggcccgcctgtcgccgcgtcaggtaccacgcaatgcgctgaatgcggtcttaggctgctgcgtactcagtacgctgtgcatttactggttgaacattaatctcgatgcgctgatcgtctatgccaacggcattttcatcatgatttatctgctgtgcatgctggcgggatgccgactcctgcacggtaaataccgcgtgctggccattgtgggcagcgtgctctgcgttttgctattggcaatggtcggctggaagagcttgtacgccattattatgctggcggtgctgtggttcgccttacctgcacggtcatcctcagcaagccgataacaaaaaaccggcgcaggccggttttgtcgttttagcggtcgtctttgtgatccagacggtcgcgttcgtcgtctttgcgctggaactccccttcgaaggtgtctccgttgccggcgccagcgctaaaaccgccgcccggcatccggctaaagcgcagatacggcatcagttttaaagtcatcagcttttgcaccggcggcaacagcagcagcaggccgaggaagtcggtaaagaagcccgggatcaacagcagcagcccggcgataatcagcgacacgcttttgatcatttctgcggcagggctttcgccagccgccattttctgctgcatcagcatcaggtttttgaagccctggttgcgcaccagcgacatccccaccaccgagctaaagataaccagaatcagcgtcagcagcacgccaagcacgtgcgcgacctgaataaagatcgagatctcgacgtaaacgtataagaaaaaggcaataaatgggatccaacgcaccggcgtctccttcattcggccgtcgtcgcagacgcccgtagtgataaatttgctattcgcgtcataggaatgtggggttggcgcgccatttttcaatcaacggtaacggcatttttttcaaaaatagtaaagcggtgactcatttcacagattaataattcttatccgccgcgctatataataagtgatcaaggttactgaacttcgctatcatcagcatatgatcgtgggcaccgggccggttaaggaaataatcttcggtctgaaaatacgctaaatcctataaattctgtgtatttggtgaattcattggcagcttgaaaaagaaggttcacatgttaaacaacattcgtatcgaagaagatctgttgggcaccagggaagttccagctgacgcatactatggcgttcatactctgagagcgattgaaaacttctacatcagcaacaacaagattagcgacatccctgagtttgttcggggcatggtgatggtgaagaaggccgccgcgctggctaacaaggaactgcaaaccattcctaaaagcgtagcgaacaccattgtcgccgcatgcgatgaggtgctgaacaacggtaaatgcatggaccagttcccggttgatgtgttccagggcggcgcgggcacctccgtcaatatgaacaccaacgaagtgctggcgaatatcggtctggaactgatgggccaccagaaaggtgaataccagttcctcaaccctaatgaccacgtcaacaaatgccagtccaccaacgacgcctacccaaccggtttccgcatcgcggtctatgcttcgattctcaaattaatcgatgccatcaaacagttgggcgaaggcttccaggcgaaagccgtcgagttccaggacatcctgaaaatgggccgcacgcagttacaggatgcggtgccgatgaccctcggccaggaattccacgcttttaacgttctgctgaacgaagaaaccaaaagcattctgcgtaccgcagaactgctgctggaagtgaacctcggcgcgaccgctattgggactcgcctgaacacccctgacggctaccagcagctggcggtacagaaactggcggaagtcagcaacctgccggtcgttccggcggaagacctgattgaagcgacttctgactgcggcgcgtatgtgatggttcacagttcgctgaaacgcctggcggtcaaactgtccaagatttgtaacgacctgcgcctgctctcttccgggccgcgcgctggcctcaacgaaatcaacctgccagagctgcaggccggttcctctatcatgccggcaaaagttaacccggtggtgccggaagtggttaaccaggtgtgcttcaaagttatcggcaacgatactaccgtaaccatggcctctgaagccggtcagctgcagttgaacgttatggagccggtgattggccaggcgatgtttgaatctatccatatcctgactaacgcctgctacaacctgctggaaaaatgcgtgaacggcattaccgccaacaaagcggtatgcgaaagctacgtctacaactccatcggtatcgtgacctacctcaatccgttcatcggccaccacaatggcgatatcgtcggcaagatttgcgccgaaaccggtaagagcgtacgtgaagtggtactggaacgcgggctgctgaccgaagccgaactggatgacattttctccccgcaaaacctgatgcatccggcttataaagcaaaacggtataccgatgaaagcgaacagtaagctttcagggtaaactaaccaaaggcatgtcagtgatgacatgcctttttgcttttttgggtttacgaaacgacaacaattcaatatcaacttgttaaaaaacaaggaaggcatatatgtttggtgcagagctcgtggttgtcctgctggcaatctatttgggggcccgactcgggggcattggtatcggctttgccggtggcctcggcgtcctcgtcttaaccttaatttttcaaattccacccggcgcaatcccctttgacgtcattgaaatcatcatggcggttatcgccgcaatcgccgcgatgcaggtcgccggagggatggattatctggtcagcctcgccgaacgtatgctacgccgccatcccaagtacattaccttccttgcgccgctggtcacctggtttatgaccgtgctggcaggcaccggtcataccgcgttctctaccctgccagtgattaccgaagtggcgaaagaacagggtattcgcccttcccgcccgctctccatcgccgttgtcgcttcgcagattgcgattaccgcctcgccgatctccgcggcagtggtcttctttgccggtattctcgaaccgcttggcgtcagctacctgacgctgctggcgatctgcctgccggttaccctgattgccgtcatgctgaccgccgtggtctgtaacttcctcggctgcgagctgaaagacgacccggtctaccaggaacggctggcaaaaggggaagtgagcctgcgcggcagtcaggtcttcgaactgaagccgcatgctaaacgctccgtcctgctgttcctcgtcggcatcgtcgcggtcatgttctacgctactgccatcagcgacaccgtcggcctgatccagaacccggtactgccgcgtaacgaagcgatcgtagtcttcatgctgaccatcgccacgctgattagcatcacctgtaagatcgacactggcgaagtgctgaacgccagcacctttaagtccgggatgagcgcctgcgtctgcgtgctcggcgtcgcctggcttggagataccttcgtcaaagcgcacattgccgatatccagacggtagcgggcgatctgctgcacaactatccgtggctgctggcggtagtgctgttcttcgccgctacgctgctctattcacaggccgccacgaccaaggcgttgatgcccgccgcgctgctgctcggcgtcaccccgctgacggcaattgcctcattcgccgcggtctcagcgctgttcgtgctgccaacctatccgaccctgctggccgcggttgaaatggacgacaccggctccacgcgtatcggcaaatatgtctttaaccacgccttcctgatcccgggcgtcatcgccattacgctttgcgtgatcctcggattcatcttcggcggcctcatgctgtaagatcgttaaaaaggggccagtaaagtaactggcccctttggttaatctccccgcatcatgcatgctatagtgcctcttttcgctgatacgaggttcacgatgactacgcctgatgctgttgttgtactctgtaccgcgccggatgaagcgaccgcccaggatctggcggccaaagtgctcggggaaaaactcgccgcctgcgccaccatcctgccgggagcgacgtcgctctactactgggaaggaaagcttgagcaggagtatgaagtccagatgctgctcaaaaccaacctggcccatcagcaggcgttactggactgtctgaagtcccatcacccgtatcaaacccccgaactactggtcctgccggttactcacggagacaacgattacctctcatggctcaacgcatcattacgctgatcctgctactgtgcagcgcatccgccagcgccgggttgtttgacgcccccgggcgctcaaacttcgtgcctgccgatcgggctttcgcctttgactttcagcagaatcaacacgacctcaacctgagctggcacatcaaggatggctactacctctaccgtaagcagattacgctgacgacaaaggacgcggcgatcgtcgacccttctctaccgcctggcgaatggcatgaagacgagttttatggcaaaagcgaaatttatcgtcagcgcctgatgttgccgattaccctcacgcaagccggcaaagcagccacgctgaccgtcacctatcagggctgtgccgacgccgggttctgctatccgccggagaccaaagtcgtgccgctcagcgcggtgctcgccgattccgacaaggcgcaagcggaccaaccttcttcagccacgctccccgccagcggcagccagaccggcgcggaaccctcgtcgctgccattttcggcgctatgggcgctgctgattggtatcggcatcgcctttacgccttgtgttttaccgatgtatccgctgatttccgggattgtcctcggcggtaaacagcgcttatcgacggcgcgcgccctgctgctggcatttatttatgtccaggggatggcggtaacctataccgcgctgggtctggtcgtggccgccgccggtctgcaattccaggccgcgctgcagcacccttacgtattaattgggctgtcagtggtatttatcgcgctggcgctgtcgatgttcggcctgtttacgctacagctgccttcatcgctgcaaacccgactgacgctaatgagcaacaagcgccaggggggctcgccgggcggcgtgtttgcaatgggcgctatcgccgggcttatctgttccccttgcactacggccccgcttagcgccattctgttgtatatcgcccaaagcggtaacctgtggctcggcgacggcacgctgtatctgtacgcgctgggaatggggctgccgctgatcctggtgaccgtgttcggtaaccgtctgctaccgaagagcgggccgtggatggctcacgtcaagaccgcgtttggcttcgtgatcctcgcgctgccggtttttttactggagcgcgttattggcgaagcctggggtttacgcctgtggtcgctgcttggcgtcgccttctttagctgggcgtttattacctcgcttggcgcgagcaaaccgtggctacggctggtgcaaatcgtcatgctgggcgctgcgctggtttgcgcgcgtccgctgcaggattgggcctttggcgcgccggccgtccagcagcaggcgcatctggaatttacccgcgtcagcaccgttgatgaactcaaccaggcgctggcgcaggccaaagggaaaccggtcatgctcgatctgtatgccgactggtgcgtggcctgtaaagagttcgaaaaatatacctttagcgctcctgaagtgcgacaggccctaaaagagaccgttctgctgcaagtggatgtcaccaagaacagcgcgcaagacgcggccctgctgaagcatttacaggtgctcggcttgccgacgattctgttcttcaacgcgcagggagaagaacagcccgcgcagcgcgtcaccgggtttatggatgccgcggcattcagcgcccatttgcgcgattggcaaccgtgaacgacacttgaggaggataaatggaggagactaccgtgcaacgtgaagatgtcctgggtgaagccatacaaattctcgaaatcgagggtatcgccaacaccacgctggaaatggtcgccgaccgcgtcgcatatccgcttgatgacctcaagcgtttttggcctgaccgcgaagcgttgctctatgacgccctgcgttatttaagccagcaggtagacgcctggcgtcgccagctattgctggatgagacgctgagcgcagaacaaaagctgctggcgcgctatagcgcactgaccaaatgcgtcagcaaccaccgttatcccggctgcctgtttatcgctgcctgtaccttttacccggatgcccagcacccaattcaccagttagcggaacagcagaagcaggcttcgctggcctacacgcacgagctgctcactcagcttgaggtggatgatccggaaatggtcgccaagcagatggaattaatcgtcgaaggctgcctgagccgcatgctgatcaaacgtagccaggccgacgtcgataccgcccatcgtctggcggaagatatcctgcgctttgcccgctgccggatgggcggcgcgcttacgtaattcggatttccgaacccccgcaaggcgcatataattccctgacactttctgtggtagggatttctatgcgtccacttctctgggccgccatactggggctctgttcgacctcgctgatggccgcccctcctcgcggtttctctttcgcctacaaagattgggaagtcgcctgcgataataccggcacctgccgggcggcgggctatggcgcgacaatgggcgaagtcagcgttctgctgacccgtagcgccggccccgggcggcaggcaaccgcgcaggtcacgtttgcgcagaccgagcacgatattccgccagatgccagcgtaaatctgtttatcaacgataacgatcgcggagcgcttgaggctatcgacgacagccattttcattttgacagtacgcaaaccagcgcgcttattaccgccctggagcaaaacgctaaaatcgagctggcgctcaatggccagcgcaaacggctgtctaacgcgggcagcagcgcggtgttcctcaagatcgatgaattccagcagcggatcggtaccgccgatgcgctgttacgtaaaggcggcggtgacggcagcaccgtcctgcgcgccattcccgcaccggagatcctgagcgcgtcgtttattcacaacgcccagcccgttgcgctcaatgcgaaacaacagcagaaatggctgccgcaattggaaagcacgctcaacagccagtgtgatgactggcaaaacgccgatattccggccaacgaacggcagttcaccgtcaccccgctggataaaaatcactcgctgctgcaggctctatgctggcgcgccgcctataacgacggctacgcgatgtgggttgtcgataacacacaggccgccaggccacagctgataaccactgatgcctccagctataacgatggcgtaatgaccttcttcaacaaaggacgcggcgtcgccgactgtgttaacggggaagaacgtgtgtgggatggcaaaacctttgtgcaaagcctcaagtacagtaccggcatgtgccgggaaatcaccccaggcggaacctggcagcttcccacctttgttagcaaagttatcccccgtcagcaacgagaggccgacatactcgcgctgaagacgttgcacgatgcggtactaaaagagcaaaaacgcaacccggaactcgcgctagagaacattgcggaacagttcccgctcacaggccacgtcactcactttaccctcacctatgccgacgacgcgccggtctcgacgaccaagccagcggcggatatcagcgacgatgaatggcaagcgtttttgcattccgatatcagcgccgattcggaaaacggcaaagtcagcttcacgcttatcgacctcgacggcgacggcaaacgcgatctcatcatcgatagctatgttggcggcaccggcctgttcagctataccggtgtgctgaaacgcggtgatagcgcctttgagtcggtgaacaatgccgacagcaatgacgacgataacttcgatgccggcgtgcccggcgccctttactctattaacgatcgcggagcgaaccagtggggccgctggatcagaatcaacggccaggtttacgccctgtggtttaacggcgtgtttggggaagataatctctatctgctgcgtccgttcaaccagagcgacctgacgccggccatcaccatccgctaccgttataacctcaatatcattagcgctgcggaaaacgagcagacccccacccccgccttaaacgataaagatagagcgggcttattgaagtcattggacgtcatgcaaggtagcctgctaaaggataaatctgctgacgataacgatgagccgatttgcccgatcccgcctggcactgcgaaagacgatgcggacagctactatggcggcgctgcaggacactatactgtcgaaacggtggcgtggatcccggtgtggctcaacgataaatgctttatcggcacgattttcagccatcatggcgcttaccgccatggagtggatgcgatcttaaccatcagttcgccacgggatgacgaagagctcgttggcgattacgacatctccggaaaacgccatgccattgccatcaccagcggctggaaagttcgcgaaggcgataacggagtgatgtgattttaagcaaaacgcgccttttgacgcagaattgccgcaaagataagcaatcaaacaataaatagagaaatttcattgacgcagtgggcggattacggtttaatgcgccccgttgcccggatagctcagtcggtagagcaggggattgaaaatccccgtgtccttggttcgattccgagtccgggcaccactatttaaagaacccgcccaaaaggcgggtttttgcttttctgcgaccggactcttcatcgaactgcgttcgattattcgccgcaatgcggctcaccccttcggggccagcgcgacaagcgcgctgttcaacgtcgactgcaaacccgtaggcctgataagcgcagcgccatcaggcggaatgcaggcatagaaatctcccgcttgtatcgatagcctttcctctacccaatgtatgatttcaaaatgaaaaaaaatgagcctgaaggaggaatggagggagcgccatgcatcagaatttaatccccacaccagggcacagatgctctcctcctgaaacgggtgagagagaaaggaatgccgtcacgcagagctagcgccgcgtcgctttctttttagcgggaaggcggaacacttcgccattcggcttagcaattcccatacgatactgcgtctctctggctgccttgtggatgtcagcaaactcttctttacgcgccggcggcagcttcgcttttttcaggcatttattgcggtgcatcctaatccattcacggtcgttatcatcgacgcacgtctgcatcacatccacccagcgcgaagcggcccgacggtacaatccacgggcttccagagactcggcgatactgtccttgatcattcgataatttctctcacatatgctagctaatttgcgtatataaatataaccacgccatccgaagaaataatgaaagaaaaccccgataatttgatccacgataaatctatgccagctcaatattgagggcatttataatattaattgctgtgtgcattaaaactgccgaagcagtaagtacttccaaagagcatttttatcatataccgcggattatcatctgagttattcctgaactacggttatacctatcaatgattgattaaattaacataataccgttgttgagtagcttgtcgtagataccttactctgtattcatttccctttttatcgcttctgtgcgggacactccagcagtctatttttaaagataaacaaacaggcctcattaaagttggccagccccagacgttcataaagctcaatgcgcttgcgatacaggcttttcacctaagtattaagtaccccagctatttgctccatggtcatccccgctctgagtaaagtcaacgtcatatgttcctgcggtttcaggctgaaattcttgagccattctcgggtcaatcgcttactcttcacgtcaagaaacaggctaaataaattagccatatccgtcggcgtcaaagacatgttgagaaaccactttaagctcagcaaatgctcttcccgatggcgcatatcaagcataatacagcagatacgtttacccgcttccgctgcgccaggaataagataatcgtaaaaacaaagcggcgcccgactatccaccagcaccgaaaactcctcggcatcactctcaaaaagcttacgctctatcgaatgtaactggatgatatctggaaagaaaatcctcaccccttcaaagagatagtgatcctgagttactaaaaacattgtcgttgccacaaatcatccctttaacaataaagcaacaaaacccctccagggagaatatgcacagctcctggtagcgtgctgactatggcgagccaaataaagcatgtgattgtcttttagtaatcccccaatctctccatctatagtgaacgctccactccactatccttacgtcatttcttaattatctgtgctcaggctaattataaataaaaaactcgcacaaaaaagaagcttttctactattgagaatttttgtcaaaaatcgtcttaaatatctacagcaacagcctgacattatgcgtgaaaaagccaaccaaaaacattaaaacagaatttcggacaccatttaacttttttcaattcagttagttatgcgtaacataagacaattaattaattcattaaaggtcaatttccagatttatcttaaaactacaggcctattatttggcatattttcaggcaaacatatcaggtgtacattaatcgccaccccgttatcgcgaggagatattttattaccttaaataagtaatcgcagtcgcgtaccgtcaggtaaaaactcattaccccatccttttgcattcagctaaaaggccgacgtgttgtgcaatggattcttgatggacatatggtaaatagttatgggaagatcaactcgtttcaataagttattcttttatcgccgcacgacattctcgctttcaattagtttattgttgttaacgcctattctggcacagggggctgagtcgatatatgatcggcatgtgctacaggcgcgtgaaggtaattactccccttttctcgattatcttcagcaatatcaacaacaacatgctttgacgcctgagcaagtcgccgactggcttcaaattgcctcctgggctggacgtgatgaggaagtaatccaggtctggcagcgttatcaggtttatatggcgctaccggcacgcggtacggcggcagcggcacaggctttccgtaatcaaaaacggtggtcttcagcgctggcgctctgggatcaggcaattggccagcagccgatgaacgacgattatcttattggtcggattaaaacgctggccgatgcgcgccatgacgggcaggcgctaagtgaagcccgccgcttggtcgccaccacgcccagcgccgctcacctgcagacgctctcctacgtctatttacgtcagggaaaaagctgggaccagctgctcaccgatatgcgcgcgcaggaactcgcgccgcaaaacagagaaacactcaatagcctgcttgatagcctgagcagcaatcgcatcaattcgcctgcgctgcaatggtcagcgaaaaccaccttaacgcccgcgcagcagcgaaagctggaaatggacgcggcggcggagtgggtacggctggcgcacaccccggcccgcggtgaacaggagcgctttcgcctcgcgcaaacggcgctcaaccgctacgacgcgctgttcgcccgttggcgtcaggatccgctggccgcagaggatcttgcccgcgcgcgtattgaccgcctcggcgcgctatacacccgcggctattacgcccaggtcattaaggaatatcagtcgctgaccgccgctcaacagcccgtccctgactgggccatcggctgggttatctcctcttatcttgcgcaacagaacgtcgaggccgcgctggcgatcgcccgccaacatccactttaccggcctgacccgcaagatgatcagcatgaattattttacgcgctgctggacagcggccagtatcaggccgcccgcgagtatctcgctaaagtgacgaatggcgttccctacacccgccgcctttacggctcgccgacgccgcagccaaacgacccgtggctgaacgctcaatcgctgaaggtacagtatctactgagtactaacgcgctgccggaagccgaacggctctccgaccgactggccaccaccgcgcccggtaatcaggggctgcgcattgactacgcggcgatactacaggcgcgtggtttaccccgcgccgccgaacgggaactgaaagcggcggaagcgttggagccttcgaacatccccctcgaacgtcagcaggcctacgtggcgatggatcttcaggagtggcggcagatggagctattaaccgatgacctgctggcgcgcagccccgaagacctgagcacgcaaaaattagctcgcgctcgcgaggtgcaccatatgtcggaactgcgccttaacagcacgcaagggatccactcggataacccggtcagcggtagccacgactttagctgggatgcggcgatttacggcccgccaatcgccgataagtggcgacttttcgccggtaatcgcttcgccaaagggaattttgatgaaggaaaaggctccagccgccagctatttggcggcatcgaatggcgcccgcgcgatgcctgggctgaactggaaatctccaacaacaatttcgccggcgacaacaaacccggcgcccgactttccgcctggcaaagcttcaacgacagctggcaaattggcggcgaggtcgaacgtctgtcgcggcagacgccgctgcgcgcgctgcgtaacggtatcagcgccaaccgcggcgagggctgggttcgctggtatcaaaacgaacgacgcgaatatcgcttcagcgccgccgccacccgcttctccgaccacaaccgtcgtcaggaatatacattctccggcaaagagcggctctggcaatcgccaaccatcacgctcgatctggaacctgggctctccgccagcgtcaacagccgggcggataccctgtactacaacccgaaacgcgacttcgccgccacctcggcgctggtcgccgatcacgtcatgtatcagcactacgataccgtctggagccagcagcttgcggcaggcggcggcgcctactggcaaaaagcgtattcgaccggcgctatcgccatgctcggctacggccagcgtattcgctggaacaacgtgatcgacaccggcgtgatgctgaactgggacaagcgtccctacgacggcaaacgcgaaagcaatctctccattgcccttgatgcgaatttacggttttaaggataaacatggtcaacaaaagtatccgcatcagcctgatggttatcggctggctcctgatgacctgcgcgcttcgcgcagaaacgattccttttctgccgccggacgcgcggccgcagccggaggcgaataagccctggccacagaataagtttctggtattggcctatcacgatgtagaagacgatgccgccgatcagcgttatctggcggtgcgtaccagcgcgctcaacgatcaaatcggctggctgctgcacaatggttataaggccgtcagcgtgcaaaatattctcgacgccaacgcggggttaatcaccctgccgccaaaggcatttctgctgagtttcgatgatggctacagcagtttttacacccgggtctggccgctgttaaaagcctggaacgtcccggcactatgggcgccggtaggcagttgggtcgatacgccggagcagaaaaaagtcgatttcggcggtctgatgaccccgcgcgagcgtttcgccacctgggagatggtgcgcgagctcgcgcaatcgccgctggttgaaatcggcgcgcatacctgggcttcgcactacggtattcaggccaatccgcaaggtagccgcgaaccggcggttgccaaccgtttttatgataaggccagcggacgctacgaaagcgaccagcagtttcaccagcgcatcgataccgacgtgcgcaaagtgagcgacaaaatcgccgacgtcaccggcaaagcgccgcgcgcctgggtatggccctacggcgccgccaacggcacatcgctggctatcgcgaaaagccgcggctatcaactggcgtttaccctcggcgatggtctgggcgatgtgcgggatttggataacattccccgtctgcttatctccggcaatccgtcgatcaaggccttcgccagccaggtgacgcaaatccaggagcgtgagccggttcgggtgatgcacgtcgatctcgattatgtctacgataaagacccggctcagcagcgcaaaaatatcgataagctgatccagcgcgtctacgacatgaaaatcactcacgttttcctgcaggccttttccgatccgctcggagacggcacggtgaaagcgctctacttccccaaccgccgcctgccgatgcgcgccgatctgtttaatttcgtcgcctggcaattgcagacgcgcggcggcgtcaaagtgtatgcgtggatgccggtgctggcgttcgatctggacagtgcgctgccgcgcgtacagcgctgggatgcgcagagcaacacgctgcgccaggccactcgcccctatgtacgtctgtcgccatggaatagccaggtgcgcgatgagatccgcgatatttatcaggaccttgcccgctacgcgacctttgacggcgtgctgttccacgacgacgcggtgctgacggattacgaagatgccggcaccggggcgatggccgcctggcgggcggcgggccatcgggaggatatcgcgcagatccgccaaaaccccgccgcgctgcacgcctggacgcggtttaaaagtcaggcgcttatcgacttcacccgcacgctcagccagagcgtgaaagcgattcgcggcccacaggtgagaaccgcgcgcaatatcttcgccctgccgatcctgcagccggaaagcgaggcctggttcgcgcagaatctggatgattttctggcggcctacgactggacggtgccgatggcgatgccgctgatggaatccgttccggtcgcggaaagcgatgcgtggctggctcgtctggtgcgcgccgtcagcgccaggccgggcgcgctgaagaaaaccatttttgagctgcaggctaaagactggaccctcccgcagcagaacgccatccctgaccaacagctggttgactggatgcggacattacagctcaacggcgtcaacaattacggctactaccccgacgatttccttaataatcagcctgatatctcgaaaatcaggcccctgttttcatcgtactggtatcccaacaatgactgatcgcattatcgcattttcgattttatgcctggttttcgggctgcctctgggcgtagccgccgttttcaccggcgagttgatactggatttcgtctttttttggccgctgtttatgtcggtgctgtggataaccggcgggctctacttttggtttcaactggagcgccactggccgtggggtaaagagaccccgccgccggagctggcaggtaatccgttgatctccattttgattccctgctttaacgaggagaaaaatgcccgcgagaccatcgaagccgcgctggcgcagcgctatcgcaacattgaggtgatcgccatcaacgacggctcctccgatgataccgccagggtgctgaatcaactggcagaagagtacgctctgctgcgggtgattcatctggccgaaaatcaggggaaagcggtagcgctgaaagccggcgccgccgccgcgcgcggggacttgctggtgtgcatcgacggcgatgccctgctcgatcgcgataccgccgcctaccttgtggcgccgctgattcagtatccccacgtcggcgcagtgaccggcaacccgcgaattcgtacccgatcgacgctgattggccgcattcaggtcggcgagttctcttcgataatcgggctgattaagcgtacccagcgtatttacggccgggtgtttaccgtgtccggggtgattgccgcttttcgtcgccaggcgctggcggacgtcggctactggagcccggatatgatcaccgaagatatcgatatcagctggaagctgcagctacgccattgggcgattttcttcgagccgcgggcgctgtgctggatcctgatgccggagacgctgaaggggctgtggaaacagcggttacgctgggcgcagggcggcgccgaggttttcctggtcaatctgcgccgcctgtttcgctgggagcatcaccggatgtggccgctgttcctcgaatatgccctctccacgctgtgggccttcgcctatgcggtcaccatttttctgttcatcgccagccattttgccccgctgccggaaaacctgaccgtccgcagcctttttccgccggaatttaccgggctactgctgggggtgatgtgtctgctgcagtttatcgccagcctgtacatcgaacggcgctatgaacgcggcgtcgccggctcgctgttctgggtgatctggtttccgatggtgtactggatgatcggcctgttaaccaccatcgtcgccttccccaaagtcatgttgaaacgtaaacgcgccagggctcgctgggtcagccccgatagaggtaaaggaagaatgtcatgaacgaacaaaccctgatattaaccgagcatcgtatgctgccgcggatctttgacggcgtgttaaccgctatcgcgtgggccggcttcgccttttttctgtatgccaacctgctgatgcagtttaccgagcgcggtaacgacagctgggacgcaattatggcgtcgtttaataccgtgctggtctatttactggtggcggcaattaacggctggctgctgattttgtggtatcagtacaatctacgccgttataacgcccggcggcacggcagcatggcctcgctgcgccatgaagagctggcagagagctttaatatcgcgccgcagatcatttccgagatgagccaatataacctgctgacggtataccacgaccagattggcagaatcattgatttaaaaatcaatcagagcgaggaagacgaacgctaacggaaccacaaaaaaggccgcatcacgtgcggcctttgctctttcagtccggtgagattactgaccgccggctttcttaatcgccgcatccagcgaggctttgtcggccagtcccgggaagacggtaatggtcgcttcggttgcgccggtagtcggcatgacaatcacgccaggcgtaccgcttaagccaatctcctgcgccagctggttaatgttttccagcgccggttcgacgtccgccgcttttttggcgtcaaagttcacctttttcgcctgctgttggatgtccgccgccgtcagtttgccttcgttatgcccggtggcgtaaacgccgttgtggtaagtcagataggcctcggcccctttctgctgatatatctgcagaccggttttcgccgcatccagcgaagttgcccaacggctgccgaaaatcggccactctttgaaggcaaaacgggtttgcggatggtctttaatcacctgctccataaccggcgcgaggcggctacagtagatgcattgataatcgaagaactcgataacggtgactttaccgttagccgggccgtaggttggcgtggccttatcctgcgtcagcttgtcggcattcttgattaccgcctgggtagcggcgctggcctgctgttccgcctgaatttgctgcagcttttggctggcctgcaatagcacttccggatgagcgaccaggtagtcagcggcgattttgccaatacgcgcttcctgctccgcggtgaaagtcgcggccggcgcgttagcggcgctggccagcgccggcagcagggaagcgcccgccagggcgagaataagtagattcttgatgccagacatattgaaaagtccttacgaaaaagtagacggcaggtgagcctaatcggacaaaatatcatcctttggcggcgaatcattgtcagtctatgcattgattcgtaactttatttgtcagacgtcacgcttccccctacggcttgaagggtggtcaggggcgaagaacgggagtaccctgcgcccatcttttttgatcgacattatttgcaatacgagccaggcatgaacgaaatattgagtcagtgggacttcgccgtcattttgctacaaatcatcgccatcgatttgttattaggcggcgataacgcggtggtcatcgccatggcctgccgcaagctgccggcgcatctgcgcaccaaagccattgttatcggtactctcggcgcgattatcgccagggtcgcgctgctggcggtggctatctatttgctgtcgttgccgtggctaaaaatcgtcggcgcgctactgctactgtggattggcattaagctggtcgccaacgaggaagaagagagcgatatcagcagctcaagcagcctatggcgcaccgccgtcaccatcaccgtcgccgatgtcatcatgtcgctggataacgtactggccgtggccgccgccggtaaaggccatctgttactggtggcgctgggggtattaatcagcattccgattattgtcgccggtagtaagctggtgttggcaatcctgactcgctttccctcggtcgtattactgggcggcgcgctgattggctggattgccggttcaatgatgataaccgacccgacctttgttcagctgttccccaattccccgaattatctacattttgttgccggggcccttggcgcggcgttggtgctgctggaaggatggcggcgcaactaccgctccggtaccccagaataatcactgaacgccgtcacccccgacggcgtcaagttttcgccacttttctccgccaccctttctcatttgccctacgcttaatagagccgcctgatccagggattctgtgaccagatttttgagcataaatgagataacaccatggaattaaaggattattataccattctgggggttaagccaacggacgatctgaaaaccatcaagaccgcctatcgccgtttggctcgtaaatatcaccccgacgtcagcaaagaacccgatgccgaagcaaaattcaaagatctcgccgaagcatgggaagttctcaaagacgatcagcgtcgcgccgaatatgatcaactttggcagcaccgcaacgatccgcagttcaaccgccagcagcacgcccacgaacaaagctacagccagcaggacttcgacgatatattctcctcgatgttcggccagcaggcgcatcacgcccgccgccagcgcgccgagcgcggccacgatgtcgaaatcgaagtggcggtgttcctcgaagaaaccctcaccgaacagactcgtaccatcagctacaagctgccggtctataacgtcttcggcatggttgagagtgaaacaccgaaaaccttgaatgtgaaaattccggcgggggtcagcgatggccagcgtattcgcctgaaaggccaggggacaccgggcgaaaacggcggcccgaatggcgatctgtggctggtgattcatatcgcgccgcatccgctgttcgacatcaacggtcataacctggagatcgtactgccgctggcgccgtgggaagccgcgctgggggcgaaagtcaccgtaccgacgttaaaagagagcattctgctgacaattccagcgggtagtcaggcgggacaacggctgcgtatcaagggcaaagggttggtgagcaaaacccacaccggcgatttgttcgccgtcatcaaaatcgttatgccgccaaaaccagatgaaaaagcgcgtgagctctggcagcagctcgccgaaagcgaagccagcttcgatccgcgtaagacatgggggaaagcctgatggctaaagtaacagtgacgtttaccatcaccgagttgtgcctgcgcaccggggtgtcggaagaggagctgacggaaatcgtcggcttagggatgattgagccgcaccagccgcaggctgaaacctggctgtttgacgacagcgcggtgacgattgtgcatcgcgctgtgcgcctgcgtaacgagctggagctggactggccggggattgcggtggcgttgacgctgctggatgaaaatgcgcgactcacccgcgaaaatcgactactgcagcagcgtctggcccgctttttgacccacagctaagcggaattcccgggtcgcggcgttccgccttacccgggctacagctcgctcacggcgcaaaccgtagcccggctgcgcgtagcgtaagccgggataagcgcttaatccggcagcgagccggcgagattacgcgcggagacgctcttgctcaccggcgcaggcggctcgggtgccttaaccggtgcggccgctggcgcggatgccggagcggaagaggctggctgaatctcaagaaacgaggccagcattctgcgcagcgtctccggtggcgtatcttccgccagcagcgccgccagcattgacggcagccggctatcaacttcacccaacgctaaccccgccaacagcgccgtacgcgacatatccccgcgatcgccgcggtgatgggcctcaattttcgcgtccgcaaagcgctcgctggcgctgatatccgggcgcaggtatatcagaacctttctgcgatccagagtcatagacgctccttaaccaataattttcagaccacgcacgagggcgaactgcggctcatcggccaccacaaagcgatcttcgcgcagacccatacgttcgcgaatcgcatcggcaaccagcggcgcgccgccgccaatcacgatggcgtgcgaatagcctttaaaactatcaatcgccgtcagaacgcgagtcgtcagccgttcgatgctattggagataacctttttcacctcagataccgcatccggatcgttgatgttatcggtcaaatactcttcgtcgtggcggttgatgattatctgatcaacgttataactggaggtatcggtattcgcccgcgccagcgccagcttaacggcgtcggtcaccagcgacacgcccagcttcgggtcgccgtaaatgcgcgaaaccgaggtcatttgcccggccaccatcgaaatatccagcgtggtgccgccgaggtcgacaatcagcaccgaatgcgacggtttcagctcatcacacaggctgatacccgccggaatggattccggacgcacggtgactttggtgatattgaacaccacgcctttattcagtttaacttcgcgaagtaggctctttttcttacgctcaatgttatcaagacgatattgcgcatcttcatcataaaattcggtcagcggcagggtgaccacaatctcgacatcctgcggttccagaccgctggtcaacagcgcatggtggacagcgatagagttcaacgggctgtattgccaatcaatattgttggtgggtaacgcatcgggggtgatcaggtcgaaagagtacttttcatcatccacggtgtagttaaatggcttcccggcgccgaaggtggcagaccagcctcgtttaaaactattggggctgatatgggtgaaagtttcgccatcttgctcccacagcattttgatattggttgaaccatcatcgataaaaatgcgcatcgcattgctccatcactgagacaaagaagagaaaatgtaagacccaaaaagagtagcaagagttaaaaagcagcgcaagagcacgaaaaagagacaattccgagttttatttgagaaacaatggagatttcgattaacccattgagttcaaatagagaacttatagagacaaaacagagaactaaaaattttcatttctgtctgttttaaacgctatttttgtgcaaaaagagagcatccctcccctctttcgccagcggtttgcacacgctttttacacctgattgggtaccacaatcggccgttccggctcgacgacattttccggtacccgacgatatttatccagcaggtgaatctgaatacgtcgcaacatatcgccattcagcttgtaataacggaaatagagaaacagcgtcagggcaaaaaagagcgtcggcagcgcaatcataatcgcctgcatccccagcagcgtgtgggacgactgcacaacattcggcacgtagccaatgatacccagcacgatggcgataaaccaggccgcaaacgccgaaccggctttgaccaccagcgtctgcaccgagtaggcgatgctttcgcagcggatattcatcgtatattcgccgtagtcgacggtatcggccaccataatgacctgcagcacccagaacagcgcagtgccgatattcaacagcacccctgccagcgaaatcagtgcgatgttgtaaacgccgctcagcgccatcatcaacagcacgccacagcctagcaccggcatgatcgatgcccccgcccacagaatgcgccgcgacagcccttttaccagtcgagggaacaagatcagcgtcagtaaattcgccgcccccgcgtaggacatgtaatacgggaacatctccgcgctgccaatgacgtaggtaaagtaataaatcgcgaagccggcaatgatattcgccgccgtgttataggccagcgccatgcccaacaggcaggccagctgatcgtttttatagatgagcgccaccatctgacgcagtgaaagatggctggaatcctcgctcatgccgctattcgacgagtaaacctcatggacgttgcgcaaggtaacgagggtggaaattacgaaaaaggcaatcagcaccagggtaaacatctggaaaccgaagccgcgatcggcgccgccgacggcgctgacaaacggcagtgtgaccccggccgtcacaaacccggcaaggctggcgaaaaagcgcgggtaaggcaccagctgttcacgttcgcgtttatcaagggtaatggtcggcaccagcgaccagaacggcacatccatgatggtataggtgaagccccacagcagataggtcagccacacccacgccagtagcgctccgccgctgaagtgatgggcgctgaacagcatatacaacaccaccgagttggtgatagttccgatcaggatccacggcttgaatttcccccatcgcgatcgcgtgcagttgacgatccagcccatgatcggatcggctatcgcatcaaggatcctcgccaccagaaacaaggtgccaaccaccccaaccgataggccaacaatatcggtgtagtaatacatcagatacatgtaaacgataccgatagcgaaatctttaccaaaagcaccaaatccgtagctgagctttgttgtcattgaaatactcatagggtacaggtcgctgtcgccagcgcctcctttagcgtttgatagagcatggcaggcgccgccgggccagatcccccggcggcatgagaagattagcggtgcagccaggccggcagccagtcgccgtggctggcgatcagatcatccaccagcgcgtagatctcttcgatccccagcaccgcagcggtgtgcggatccatcatcgtggcgtaataaacgtaatcccggtcttcgttgaggatcgcctgcgtcagcagcgtctgcacgttgatgttggtctgcatcagcgccgccagatgcgccggcagcgcgcccactttcgtcggctggatgccgttggcatccaccaggcaggcaacttccacgcagcagccctgaggcaggttgtcgataagattatcgttgcgcacgttgccgtacaccacgcttggctcgccggtccagatagcgttcatgatggtgctggcatactcgcgcgaaggtttaacctcgatccgctcgccgcttttatagctctccagctctttatgccagttggccagctgctcgacgcagcgtttagggtactcatccagcggtactttatagcgggcgataagatcgtcgcgtcccggcttgataaaccatggcgtgtattcggcgaaatgctccgacgattcggtgacaaagtagcccagctttttgaacatctcatagcggacgatgttttcgcagcgcggattgccatgcaggttcggtttcggcgcccgcccttcggcgtaggcctgcagcaggtcgggatagatactgacgtagctgccgtccgcgagctttttctccagcgacagatagaacgccatatggttaatccccgcgcagcggtagcgtaaatccgccgggtcgaggttaagatcgcgcgccagctcttctgctgtgccttgcaccgagtggcacagacccacctgcttgatatgcggatagcgggcgtacatcgcccaggtgttcatcgccatcggattaacgtagttaagcatggtggcgtttgggcaaacctcggtcatgtcgtcgcagatagcccacaggtgcgggatagtgcgcagcgcgcgcataatgcctcccggtcccagcgtatcggcaatggtctgctcaaggccgtggcgtttacagacttcgaaatcggtgacagtacagggttcatagccgccaatctggaaggcgacgacgacaaaatcggcgtcgcgcaaggcggttttacgatcgcgatggcagctaatttcgccattcgcaccgacggaatccatcagctttcgcaccacggtatgcgactcttccagccgggtttcgtcgatatccatcagcgcgatatgcgccgatttcaacgccgggcgctggaaaacatcaccgagaatatttttaacaaacaccgtcgaaccggcgccgataaaggtaatttttgggacggacatcgcgctctctccatcaggtcattgaacactttcagagtggcatgccgctcgccgctgcgctgccccgttcccaccggagcattcccggaaactcagatcggccattgaacgccacaaaatctgagtttttgggaatagatcggcttaaaaggagagaaaacgggccgatgattccgctaagctgtaatcagttcaggctaaaaacgcagccactctgacgatccaggaatccgcccatgatggaacaccgcttcacttccctgccccccgacccgcacatgtgcagcagcgatgaaaagcatagccgcagcccgctggcgctctattccgagtatcagcgcatggatatcgaactgcgccccccgcacgccatggccaccagccactggcacggccaggtagaggtcaacgtgccgttcgacggcgacgtggagtatttgattaacaatgaagtggtgcgcattgagaaaggctatatcaccctgttttgggcctgtacgccgcatcagttgacccgccccggcgactgccagcagatggcgatattcaacctgccgatgcatctgtttctgtcgtggccgctggatcgcgaactgataaaccacgtcacccacgggatggtgattaaatctctcgccgcccagcagttaagcgcttttgaagtgcgccgttggcagcaggagttgaatcacgagaatgaacagattcgccagttggcgatcgatgaaatcgccctgatgctcaagcggctgagcctcgccggctggcagccgattctggttaataagacctcgcgcacgcacaagaacagcgtctcgcgccacgcgcagttttatgtcagccagatgctggaatttatcgccgcccattatgaccaggcgctgaccgtcgatgccgtcgccgagcacgttaaactcaacccgaactacgcgatgggcgtttttcagcgggtgatgcagcagaccatgaagcagtacattaccgccatgcgcatcaatcacgtgcgcgcgctgctgagcgataccgataagaccattcttgatatcgccctcaccgccgggttccgctccagcagccgcttctacagtacctttacccgctatgtcggcatgccgccgcagcagtaccgtaaattgagccagcagcgccgccacagcctcgcgtcgccgcagccataaaaaatgccgccggggtctcccacggcggcatttttcacagcttaaaacggttagtcgttgatacgtggatgctgctgtaccagacgggcgcgtttttcctgcaggtcggcgatttcctgatcgatatcttcgattttatgttcgatgttatcgtagtgctcgcccagaatttctttcgcttcctggatatcggacgccgccggcgtcgcccctttcagcggacggttagcggtctctttcatcgacaggccggtaatcaggccaatcaccgcaatcaccatcagatagtaagccggcatcatcaggttctgggtggtttccaccagccatgccgccagcgtcggcgtcagaccggcgatcagcaccgagatgttaaaggcgctggccagagcgctgaagcggatgtgggtcgggaacatcgccggcagcgatgaggccatcacgccgataaagcagttcagcaccaccgccagcagcagcagaccggcgaagatcaggccaatcacgttactgttaatcatgataaaggccgggatagacagcgtgaacagcgcaacgctacccaccaggataaacggacgacggccaaaacggtcgctcagcatgccgataaccggctggacaaacaacatgccgaccatgatggcgataataatcagtacgccgtgatcttccgagtagtgcaggttgtgcgacaggtagctcggcatgtaggtcaacagcatgtagtaggtcacgttagtggaaatcaccaggccaatacaggtcagcaggctgcgccagtgtttggtggcaatctctttaaaggagactttcggaccctcctgcaggccttcgcggtcgccctgttcaagggtatccacgtgctgctggaacgccggcgtctcttctaacgcgtgacgcaggtacaggccgataatccccagcggcagcgccaggaagaacggaatacgccagccccagtcgaggaagttctcttcgcccacgacgctggaaatcagtaccaccacgcctgcgcccattacgaagccggcaatcgaaccgaagtccagccaactgcccataaacccgcgtttacggtcaggcgagtattcggccacgaagatcgacgccccggtatattcgccgcctaccgagaagccctgcgccattttacacaacagcagcagaatcggcgcccagataccaatggtggcatacgacggaataagaccgatacagaatgtacttatcgacatgataacgatggtgatcgctaagattttttgtcgaccgtatttatcgccgagcatcccgaagaacaggccgccgagcggacgaatcaagaaaggaaccgagaaagtaccgagcgcggcaatcatctgcacgctgggatcggcatcggggaagaagactttaccgagggcataagccacaaaaccatacacaccgaaatcgaaccactccatcgcattaccgagcgaggccgcggtgatggcttttcgcagcttgctatcatcgatgatagtgacatccctaagcgtaatcggctttatttttttccttttaagcatacttttcctctgtgctatcgccttgagcgcacgactcctcgccaaatgacgaggtcattcgcgacgtacgttgggagcggcgaagtgctgtgctccacatttcaagcgtagcaggtttgcctgcactgtctttctgacagagtgtacaaccgaacctgttgacgcctgctctggccttaaattaataattcacttaccaaataagcagtgacgaatttacttacatccctttttaccctaccagcgtttaaatttgggatcaacttcacgaaaaattcgcccagcttaattacagagccaaataaaatgaataagttcaatctctgtttcaccaccgatgtttatttctggactttattaacgtctgtttttcagcatattctccgcaaagccaaaataattaccctgcgttatttcctggaaaaaatacccgacaaaagtgcgggattgcgctataatcagccgcactttcggctcacagccgctgtttaacggaccaacgtcctgtttttcccagtaatcacgaggaacgccatgcaacttccacactgcccaaaatgccattctgaatacacatatgaagataacggcatgtacatttgcccggaatgcgcccacgagtggaacaatgccgagccggccgacgatgccgacgcgctgattgtaaaagacgctaacggcaacttacttgccgatggcgacagcgtgaccgtggtgaaagatctgaaggtaaaaggcagttcttcaatgctgaaaatcggcaccaaagtgaagaatatccgtctggtcgaaggcgatcacaacatcgactgcaaaattgacggttttggcccaatgaagctgaaatctgaattcgtcaaaaagaactaattaattttttttacgtcagcgccattatttttccggcgctggcggcaacctcaccggcacatccgaatatcagcggcggatcgcggcgaaattattttgctaatttcgcgaaaattattcccgaaatctccaggccgaaccgcgcgatcaattctcatttcgtctctgccttcccgccacgcggcgacgcattttcagaaaaattcaccccgttttgccgcctggcttcttttgcccgtcaccaactacgctttaggggtcattggttatctgaggtcatggttatgtccctgagtccttacattgcttttagcggcaactgcgctgccgccatcgccttctatcagcaggcgctggcggcgcagcttatccaccaaatcacctacggcgaaatgccgcagagcgcccaggatgccgaagatggttgcgcctccgggcaacatcttgccgccgactgcatcgcccacgccagcctgcaggtcgccgacagtattttgatgttgagcgatagccccagtagcgacatggaacattacgcgggattcgtcctcgtgctggagccgaaagatattgctgaaggcaaacactggtttgaggcgctggccgatggcgggcgcatcgaaatggcatggcaggagaccttctgggcccacggtttcggcaaagtggtcgatcgtttcggcgtgccgtggatggttaacgtcgtcaaacaaccctaatcttctctccagggcggcttctccgccctgtcatctcaccggcattaactcttcatcctgcggtcatcgtgacttaacaggaatgtaacaaaaacgcgtcagtatcggcccacgctcaacggggaaccccaaggtacttagtgaggctcgataacaatgtacttatccagacatccgaccagttaccccacccggtatcaggaaattgccgccaggcttgaacaggagctgcgccatcactatcgctgcggcgactatttgcctgcggaacaacagctggctgcgcgctttgaagttaaccgccacaccctacgccgcgccatcgatcagctggtggaacgcggatgggtccagcgccgccagggcgtcggcgtactggtattgatgcgccccatcgactacccgctcaacgcccaggcgcgttttagccagaatctgctggaacaaggcagccacccgaccagcgagaaactgctgtcggtgctgcgcccggccagcagccatgtcgccgaagcctttggcatcgccgaaggcgaaaccgtcattcatctgcgcaccctgcgccgggttaacggcgtggcgttgtgtttgattgaccactacttcgccgacctgcgcttctggccggtgctgcaaaccttcacccatggctcgctacacgacctgctgcgcgaccaactcgccatcgaactgacccgcgtacgcaccaaaatcagcgcccgccgcgcgcaggcgaaagagagcaagctgctggaaatccccaatatggcgccactgctgtgcgtacgcacgctcaatagccgcgagggcgagacagtcacgacggagtactccgtcagcctgacccgcgccgacatgattgaattcaccatggagcactgaatgcacttcgataccgccacccgccagcgttggatgtccgtgctggcccacagtgaaccgcaggaccttctggcgcgcatgcaatcgctgcggctggcgccggagtatgaattaattcgcgccccggaaaccgggctggtacagctccaggcgcgtatgggcggcatcggcgatcgtttctttgccggtgacgccactctgacccgcgccgccgtacgcctggccgatggcaccctcggctacagctggattctgggccgcgaccgcccccacgccgaacgctgcgcggcgatcgatggcctgctgcaatcgcctcactattttcacaccttaatggaaaccctcattaccccgctggaagcacaacgcagcgcgcgcctcgacgcccgccgtgccgaagtcaacgccagccgggtcgacttctttactctggttcgcggagataacgcatgacattacaaaccgcctttaccctaccggtgcaggatgcccaacacagtttccgccgcctgctgaaagcaatgagcgagccgggagtgattgtctccctgcagcagcttcagcacggctggcagccattgaatatcgcctccaccagtttgttattgacgctggccgatcacgacaccccggtgtggatggccgccgcgctgcataacgatctggtcagccaaaatctgcgctttcataccggcgcgacgctggtggaacagccgcagcaggcggtatttgccgtcgcctgcgacaccatcagcgccgaacagcttaatgtcctttccgccggtaccgtggcggcgccggaaaccggcgtcacgctgattgtgcaactagccagcctgagcggcggacgcatgctgcgcctgaccggcgcgggcattgccgaggagcgaatgatcgccccccagctcccggactgcatcatcgacgaattaaccgaacgcccgcacccgttcccactgggcattgacctgatcctgacctgcggcgagcgcctgctggctatcccgcgtaccacccacgtggaggtgtgctaaatgtatgttgccgtcaaaggcggcgagaaggcgattagcgccgctcacgctttgcaagagcagaaacgacggggcgatggacggcttcccgaactgagcgtcgagcagataagcgaacagctcagcctggcggtggaccgggtgatgaccgaaggcggtattgccgaccgcgaactggcggcgctggcgctgaagcaggccagcggcgataacgtcgaagccattttcctgctgcgcgcctaccgcaccaccctgccgcggctggcagtcagcgaaccggttgataccgccgggatgcgcctcgaacgccggatctccgcggtctacaaagatatccccggcggccaactgctgggccccacttacgactatacccaccgcctgctcgattttgccctgctggccaacggcgaaccgccgtcggtgcagaaagccggtagcgaaacgcagccgacgccgcacgtcttcaacctgctgacgcagctggggctggccaaagcggaagcggaccgcggcgcgccccctgacgatatcacccgcaccccgccggtctatccctgctcgcgctcctcgcggctgcagcagctggtacgcggcgatgaaggctatctgctggcgctggcctactcaacccagcgcggctatggccgcaaccacccgtttgccggcgagatccgcagcggctacgtgcaggtggaaatcgtgccggaagagctgggttttagcgtcaatattggcgagctgctgctgaccgaatgcgaaatggtcaacggctttgtcgatccagaggatgagccgccgcacttcacccgcggctacggcctgacgtttggcatgagcgagcgtaaagcgatggccatggcgctggtcgaccgcgcccttcaggcgccggaatacggcgaagagataagcggaccggcccaggacgaagagttcgtgctggcgcacgccgataacgttgaagccgccggcttcgtctcgcatctgaaactgccgcactatgtcgatttccaggccgaactggcgctgttgaaacgcctgcaacgggagaacgaacgtggctaacccactgactggctataactttgcttatcttgatgagcaaaccaagcgcatgatccgccgggcgatactgaaagcggtggccattcccggctatcaggtgcccttcggcggccgtgaaatgccgatgccctacggttggggtaccggcgggatccaactgaccgccagcgttatcggcgagaacgacgtactgaaggtcatcgatcagggcgccgatgacaccaccaacgcggtgtcgatccgccagttctttaaacgcgtaaccggcgtcgccaccaccgaacgcaccgaagacgccaccctgatccagacccgccaccggatcccggaaacgccgctggtggaagatcagatcctgatctatcaggtaccgattccggagccgctgcgctttatcgaaccgcgcgaaaccgaaacccgcaccatgcacgcgctggaagagtacggcgtaatgcaggtgaagctgtatgaggatatcgcccgcttcggccatatcgccaccacctacgcctatccggtgaaggtgaacggccgctacgtgatggacccttcgccgatcccgaaattcgataaccccaaaatgcacatgatgccggcgctgcagctgttcggcgccgggcgcgaaaaacgtatctacgcggtgccgccctataccgcagtcgaaagcctcgatttcgacgatcacccgtttagcgtgcaggagtgggatgaaccctgcgccatttgcggttcgcgccacagctatcttgacgaagtggtgctggatgacagcggccagcggatgtttgtctgctccgataccgactattgccgccaacagagcgaggcgcagaaaaaatgagccagccgttacttacagtcaatcacctgacccatctctatgcgccgggaaaaggttttagcgatgtctctttcgagctgtggccgggcgaagtgctcggcatcgtcggcgaatccggctccggtaaaaccacgctgctgaaagcgatttccgctcgtctggcgccgcaacagggtgaagtgcggtatcaacagcgctcgctatatgccatgagcgaagccgaacgccgccgcctgctgcgcaccgaatggggcgtcgtgcatcagcacccaatggacggcctgcgtcgccaggtctcggcgggcggcaacatcggcgaacggctgatggcgaccggcgcccgccactacggcgacattcgcgccaccgccgaacgctggctgcaggaggtggagatcccgccttcccgcatcgacgacctgccgaccaccttttccggtggcatgcagcagcgcttgcaaatcgcccgcaatctcgtgacgcagccgaaactggtgtttatggatgaacccaccggcgggctggacgtctcggtacaggcgcgcctgctcgatctcctgcgcgggctggtagtggagttagggctggcggcggtgatagtcacccacgatctcggcgtcgcccgcctgctggcgaaccgcctgctggtgatgaaacaaggacaggtggtggaaagtggcttaaccgaccgggtgctcgacgatccgcatcatccttacacccagctactggtgtcgtcggtgttgcagaactaaccctcggtgccgttcccggcggcgctacgcttggccgggctacaaattcagcgtagcccggccgagcaactcgacgccggggaggcacgaatgctaatgaggctaaaaatgaacgctatacgcgttgaaaacatccataaaacctttgttctgcaccaacagcacggcgtacgcctgccggtgctcgccgacgcttcgctcaccgttaacgccggggagtgcgtggtgctgcacggccattccggcagcggtaaatcgacgctgctgcgctcgctgtacgctaactatctgccggacagcggtcatattcatatccgccacggcgacgaatgggtagatctggtgaccgccacgccgcgcaaggtgctggaagtgcgtaaaaccactatcggttgggttagccagtttctgcgggtgatcccgcggatatccgcactggaagtcgtcatgcagccgctgctcgacctcggtacgccgcgcgaagagagcgccgctaaagccgcccgcctgctgacccagctcaacgtgccggagcgtctgtggcatctggcgccgtccaccttttccggcggcgaacagcagcgggtcaacatcgcccgcggttttgcggtcgactatccgattttactccttgatgaacccaccgcctcgctggatgccaacaacagcgctgcggtggtggcgctgatccagcaggctaaagcgcgcggcgcagctatcgtcggtattttccatgatgaaacggtacgcggccaggtcgccgatcgcctgcacccaatgggtatcactgtatgataatcaataacgtaaagctggtactggaagacgaaaccatcgacggctcactggaagtgcaggatggacgaatttacgcctttgccgagagccagagccgacagcccggcgccctcgatggcgaaggcggctggctgctgccggggcttatcgaactccataccgataacctggataaatttttcaccccgcggccaaaggttgactggcctgcacactcggcgatgagcagccacgatgctttgatggtcgccagcggcatcaccaccgtactcgacgccgtggcgattggcgacgtgcgcgacggcggcgaccgccttgagaatctggaaaagatgatcaacgcggtggaagagacgcaaaaacgcgggcttaaccgcgccgagcaccgcctgcatctgcgctgtgaactgccgcaccacaccactctgccgctgtttgaaaagctggtcgaccgcgagccggtcaccctggtgtcgctgatggaccactcgccgggtcaacgccagttcgccaaccgcgaaaaatatcgcgaatattatcagggcaaatatcagctcagcagcgagcagatgcaacgcttcgaagaagagcaaatggcgctggcggcggcctggtcgcagcctaatcgccaggctatcgccgcaatgtgtcgggagcgccaaatcgctctcgccagccacgacgacgccactcatgaacatgtcgccgaatcccaccaacttggcagcgtgattgccgaatttcccaccacgttggccgccgcgcaggcttcgcgccagcacggaatgaatgtgttgatgggggcgccgaatatcgtgcgcggcggctcgcattccggcaatgtcgccgcgcatcaactggccgccagcggcctgttggatattctctcttccgactactaccccgccagcctgcttgatgccgctttccgcatcgccgatagcgacgacaacgctttcacgctggcgcaggctgtccgtctggtcagcaaacatcctgcgcaggcgctgggcctgcatgaccgcggcgtcatcgccgaaggcaaacgcgccgatctggtgctcgcgcaccgccgcggccagcacgtccatatcgatcacgtctggcgtcagggaaagagggtcttttaatgcctggaaaactgatttggctggtcggcccctcggggtcgggaaaggatagtctgctggccgcgctgcgccagcgtgagcatccgcaactgctggtcgcgcatcgctacatcacccgcccgcacctggtgggctgcgagaaccatattgcgctcagcgagcatgagtttttcacccgcgccgagcgtaatcttttcgcgctaagctggcatgccaacaataattactatggcgtcggcatagagatcgacctctggctgcatgccggttttgatgtggtcgccaacggctcgcgcgcgcatctggcgcaggcgcgggaacgttacgatgacgtactggtaccgatttgtctcgaagtttcgccaacggtgttgcgccagcggcttgaacagcgcggtcgggaaaatgccgtggaaatcgcccaacgcctgcaacgcgccgcgcgctataaaccggccgattgcctgacgttgaataacgacggcagcctcgggcaatcggtagagcgtttcttccagctgttgcgccagcacgccggacgtgaagagaatcagcatgcctgagggtaaggtaatacgatgagcctgacgatccgcctgaccggcaccggcggcgcccagcaggtgccggtcttcggctgcgactgcgccgcctgccagcgcgcccgcgtcgatgctcgctatcgccgccgcccctgcagcgcggtggtgcgctttaaccatgcggtcacgctgctcgacgccgggctggcggatctggcggaacgccagcccgctggcagcttccagcagattttattgacgcattaccatatggatcacgtgcaggggctgttccccctgcgctggggggtgggcgatccgattgcggtgtacggcccgccggatgacatcggctgcgacgatctgtttaaacatcccggcatcctcgattttagccacaccgttatccccttcacggtatttgaattacaggggctacaggtcacgccgctgccgttaatccactcgaagctgacctacggctatctgctggagtcggcgcacagccgggtggcctggcttgcggataccgccgggctgccggagaagacgctgaagtttttacttaataatcagccgcaggtgattgtcatcgattgcagccacgagcccagaacagagacaccgcgcaaccacagcgacttgaataccgtgcgcgcgctgaaccaggtacttggctgcccgcgggtgatcctcacccatatcagccatcagttcgaccgctggatgatggataacccgctgccgaaagggttcgaggcgggatacgacggcatggagatcgtgctggagtaaccggcgtcatggcaatggaaaatcagtaatcgtcgtcgagacggcgctggtcgctctccagctggcgacgatcgctatcaagctggcgctggcgttcatccagctggcgacggcggtcgtcaagctggcgctggcgatcgttatattgctgctggttatccctacgctgctggcggctgccctgatagctgccgtcatcgtagcgtccgtcgtcatagcgcccgtcgtcgtcgtcggaacggctgctgcccggattgtaggcatcgttgatggcttgctgaatattgccaatagcgtcgtcaataatatcggcatgggccagttggctgctcagcgccagcgtgcaaaaaaacagagcggttgcgtaacgtttcatcgtggccagtctcatcagggtactggtggtaccttaatcaaccctatttgccgcgtgtagcggaggaatctcaaatccgcgccatcgccgcacgcaacgcctgcgccagctgcgtgcgggtgaaaggcttgcgcagtcgttcaacctcaggcaacgccggattatgcgcagggcgcaaatcctggccgctaatcaatagcagcgccaccgccgggaagcggcgttgcgcttcgtgaatgacctcggcgccgctcagccccccagggagcattaaatcgctgatcaacaacgcgatatccccggaggccgccagcatctgcagcgcttgctcgccgctttgtgcctccagcgtcatccagccaagctgatgcagctgctcgcataacgtctggcgcacatcggcttcatcctcaagcaccaacgccagccgctcgccgctcaccatcggttcgctaaccaacggcgttcgttcatcctccgccgctgccgtggctcgcggtagctgcaaacgaacggtggtgccctgccccggcgcgctttcaatcgccacgcgcccgcccgactggcgcacaaaaccgtacaccatcgacagcccaagaccgctgccgctaccggtctgtttggtggtaaagaagggctcgaaaacctgcgcttttatctcctgcgacatgccgcagccgtggtcaatcacctccagcgccaccatatcctgacgccgtccatcgctacgggtgacccgctggttccaggttcgtagcgcgataacgcctgaccgcccctccatagcgtcgcgggcgttcatcaccaggttgataatcgcgttttccagttgtccgacatcgatccacgccggccaggcaggcgactgcgcttctatttcgagacgcaacgatgcggggagcgaatgacgcatcagttcgcagacattctccagcaacggctgcagcgccaccgcctgcgggttcagcgcctgtttacgcgaaaaggccagcaaccgctgagtaagtaaggcgccgcgttcggcagccttcagcgcccgcgatatccgcggcgcatcgcgctcatccggctgtaccagttcgaggctgccgataatcaccgccagcaggttgttaaaatcgtgcgccaggccgccggtaagctggccgacggctttcattttttggctatgcagcagcgcctcctccagcccctgtcgctcaaggcggtcgatctccatctgggtggttttctcccgcagcaggcgggtggtgtgttcaagggaagcggtattgcgagcgaaaacgttaaaggcgcgcgccagttcgccaagctcatcacgccgttgcagggccggcaccgtcacgttctgctcgccgtgcgccagccgcgacatcgcgccggatatcgcgttcagattgaggccaagattacgatagatataccagccagcgcacccggtgatcgccagcgccagcagcgcggccagcaggataaacgtgctgatggagcgcaactgctggtggctttgcgccgctcgcgcctccgaagcttgagcgactctggcaacatattgattaatatcgccattaagcagcgcaaccagcgctttgatatgaaacatataccaaccgatcgccagatcgctctcttcaagctgcgccgatagcggcgccagccgcgccagttcggcgttgaaatccggcaggataaaggccagcgcagaatcgctatcgttgcgcggtaaaaagcgtctgatgtcatcgagctgcaggacgatcgagcgcggcgtcgcagtgtgtatcgcggcgacgatcaaccggtccatctcgtttaaacgctgaggatcgatcgccggtttaccatcgcgatcgttgagatcctgcaaatggcgcaaatagctctggttttgatacagcgcgctcagcagttcattgcgctgcagatggcggcgttgcccgcgttccagcatgccggcgacactctgctgcagctcgttgctacgacgaataatgctcgctaccagcgccagttcctgccgggccaacggcgccgaggccaactggcccaacgaatgcttcagcgcctgttgggtttccagcagccgttgcgcttcgcttttatactccagcgcgccaaccacctgcgacaaccgcaccgccgcggtagcgacgttagcggtatcacgcgccagattcatactgccgttcatgtcgctaagcgtttgcagctgcacctgctcctgcaactgactggcatggcgaaaaccgaaaatcgccactccggcgaccattaacgtcaccgccaccatcaacaagttaaatgacagcaggcgaccgcgggcgctaacgaaaaagtacggatggcgagaaggcatggcgactccggtcaggcgttttctcccatcattcccgtactgtcgccgaaggtgaagaaaatttctcggcgtaattgtgatctgcattaactattcaaaaatatgacaattatgaatggccgatgacatcactcatttacgttgcggtgatgaagtgccgacatcgacaacgcagccaggagagcaggcatgcagggaacaccggtgctatccatgcgcaacatcgccaaagttttcggcaaattttatgcgctgaaaggggtggatctgacggtctggcccggcgagatccacgcgctgatgggcgaaaacggcgcgggaaaaagcacgttgatgaagatcctcgccggcgcctataccgcctccagcggcgagatcctgatcgacggacaaccgcagacgatcagaggcccgaaagatgcgctggcggcagggattacgcttatctatcaggagatgcagctggcgccgaatctcaccgtcgcggaaaacattttcctcggcagcgagctttcccgcggcggtctggtacagcgtaaagagatggagtcccaggcgcaggcggttatcgaccggctcggcgcgcagttcaaagccagcgaccgggtgatgaagttgactatcgccgaacagcagcaggtggaaatcgcccgcgcgctgcatcgcaacagccgcattctggtgatggatgaacctaccgccgccctctcctcgcgagaaacgcagcgcctgtttgagctgattttacgcctgcgcgatgaagggatggcaatcatctatatcagccaccgcatggccgaagtgtatgaactctccgaccgggtcagcgtgctgcgcgatggccagtatgtcggcagcctcactcgcgatcgccttagcgcccccgaattagtgcgcatgatggttggccgtccgcttagcgatctgttcaataaagagcgcgatatcccgcgcggccagccgcgcctgcgggtgcaggatctcagcgacggcggcaaagtgcatcccagcagcctggtggtgcacgccggggaaatcgttggcctcgccgggctggtcggcgccgggcgttccgagctggcgcaactgattttcggcgtccgcaaagcgacgggcggcgtcattgaaatcgacggcgaaccggtggttattcactcgccgcgcgaagcgatcgacctcgggatcggctttctgaccgaaaaccgtaaggaacaggggctgtttctcgaactggcggcgcaggagaacatcaccatggcgacgcttgagcgcgacgccaattggggaatgctcgaccgtaagaaagcgcaaactatctccgatgacgccatccagttgctgaacatccgcgtcccgcatgctcaggtgcgcgccggcgggctttccggcggcaatcagcaaaagctgctgatttcacgctgggtggcgatcggcccgcgcattcttatcctggatgaaccgacccgcggcgttgacgtcggcgccaaaagcgagatttaccgcatcatgaatcagatggcccgccagggcgtcgccattttaatgatctccagcgaattgccggaaatcgtaggcatgagcgaccgagtatacgtgatgcgcgaaggcgctatcgccggcgagttgcaggttggcgagatcagtcaggaaagcattatgacgctggcgaccggcgtgaacgattctcaccttaaggcaggacaagcatgagcataccgaaagagacctccgcgccggcggcgaaatccgcctcggcaaaaaaaatgctgatgggcgacctgatgcaaaccgtcggcatcctgccgattttaattctgatcgtcgcggtgttcggcttcgtcgcgccgaacttctttaccgaaagcaacctgctgaatattacccgccagtcctctatcaacatcgtgctggcggcggggatgacctttattattcttaccggcggtatcgatctgtcggtggggtcaattctcggcaccaccgcggttgcggcgatggtggtatcgctcatcccgccattcgcgatgctgtcgattccggcggccctgatgcttggtctgctgctcgggctgttcaacggcgcgctggtggccttcgccggactaccgccgtttattgtcacccttggcacctacaccgcgctgcgcggcgccgcctatctgctggccgacggcaccacggtgattaactccgatattagttttgaatggatcggcaataactatctcggcccggtgccgtggctggtggtgatagcgctggcggtcgtggcggtgtgctggtttatcctgcgccgcaccacccttggtattcatatttacgccgttggcggcaacatgcaggcggcgcggctgacggggattaaagtctggctggtgctgctgttcgtctacggcatgagcgggctgctttccgggctcggcggggtgatgagcgcctcgcggctgtacagcgccaacggcaacctcggcgtcggctatgagctggacgccattgccgcggtgatcctcggcggcaccagtttcgtcggcggtataggcaccatcaccggtacgctggtgggggcgctgattatcgccaccctcaacaacggcatgacgctgatgggcgtctcctacttctggcaattggtgatcaaaggggcggtgatcatcatagcggtgctgatcgacaaataccgtacccgacaccatcaaagtgcataacaacaacatcttacctgcgaggaaaagcgaatgcgtttaaaacctatagtgaccgcgctgtgtgccggcgcgctgctggccgcctccccttttgcgtcggccaaagatctacaagcgataggcgtgacggtgggcgatctcgccaacccgttcttcgtgcaaatcaccaagggggccgagctggaagcgcgcaagctggcgggggataaagtgaaggtcacgctggtgtcgagcggctacgacctggggcagcaggtggcgcagatcgataactttatcgccgccaaagtcgatatgatcatcctcaacgccgctgattcaaaaggtatcggcccggcggtgaagcgggcgaaagaggccgggatcgtggtggtggcggttgacgtcgccgccgaaggcgccgatgccaccatcacctccgataatacccaggccggcgcgatggcctgtaaatacattagcgatcgcctgaacaacaaaggcaacgtggtgattatcaacgggccgccggtttccgcggtgcagaaccgcgttgaaggctgcgaaaccgaattcaaaaaacatccggatatcaaaatcctctctgccaaccagaacgcgaaaggcagccgcgaaggcggactggaggtgatgacgtcgctgctggcggcaaatccgaagattgacggcgtgttcgcgattaacgatccgacggcgattggcgccgatctggcggcgaaacaggcgcaacgtaatgagttctttatcgtgggcgtcgacggcagtccggacggcgaagaggcactgaagcgtaaaaattcgctgttcgtcgccacgccggcgcaggacccgcaggtcatggcggcgaaggcggtggaaatcggttatgacattctgcagggcaagcccgcgccagccgcgccggtgctgatcccggtgaaaatgatcgataaaaataacgtcagcagctacaagggctggacggtgaaataacgcggcaaagcggcgccgggtctcttttcgccctacgccgctttgtcgttatggataacgtcagcggcgaaaacgtagcccagcccgcgcagggttttaatcaaggtgggctgatgcggattgacttcaactttacgccgcaggcgcatgatcagcacatcgatcgtgcggtcgaatacttccatgctctcattatgggtcagcgccagcagctgttcgcggttcagaacccggcgggcgttttgcgccagcgccagcaacaatccatactccccctgggttaacgccacgctctgctgttggggattaaatagctcacagcggcgggtatccagccgccagccgttaaacaacagcccatgctccccgcccggcacgaggctttccgcgccgatcgccccgctgcgccgcagcaccgcctttacgcgcgccaccactacccgcgcgttaaacggcttggcgatgtaatcgtcagcgcccatttccagcccgaccaccacatccgattcgcttcccagcccggaaagcattatcaccggtagctcaggccgcgtgcgctgcagctgttgtaacaccagcaatccattggtatccggcaagatcatatccagcagcaccagcgcgatatctgcgcgccgggcgaccgtcgccagcgcttcaccgccgtcctggcaggccaccacctcaaacgcgtgggcgccgagcacgtcgctcagcagctcgcagatcgcgacgtcatcatcaatcactaaaatgaccggtttcatggtttacctctgcctggcgggaatagtgtcagtctggtcgattgtgcaagcgggcgacgacaaatccatttttcgctgccgtttttataatcggcgtcacatctcctggtttttcgtcacgtcaaaactgacgatgacctgtttttcgtcagcatttcgcccaaaaaagccgcgtactatccgtcaatacccacaatgaaaacatggcatagaagatgcatagtgacggtcgattgcgcgtcagcgctaattgattaactggagcaaaaccgatgaaaaaagtcgtcacggtttgcccgtattgcgcatcaggttgcaaaatcaacctggtggtcgataacggcaaaatcgtccgggctgaggcggcgcaggggaaaaccaatcagggaaccctgtgtctgaaaggctattatggctgggacttcattaacgatacccagatcctgaccccgcgtctcaaaacccccatgatccgtcgccaacgtggcggcaaactggaagccgtctcctgggatgaggcgctcgattacgtcgccacccgccttggcgccattaaagaaaaatatggcccggacgcgatccagaccaccggctcctcccgagggaccggtaatgaaaccaactacgtgatgcaaaaattcgcgcgcgccgttattggcaccaataacgtcgactgctgcgctcgcgtctgacacggcccttcggttgcaggtctgcaccagtcggtcggtaacggcgccatgagtaatgccatcacggagattgataacaccgacctggtgtttatcttcggttacaacccggcggattcccaccctatcgtggcgaatcacgtcattaacgccaaacgcaacggggcgaaaatcatcgtctgcgacccgcgcaagattgaaaccgcgcgcatcgccgacatgcacatcgcgctgaagaacggctcgaatatcgcgctgctcaacgccattggccacgtcattattgaagaggatctgtacgataaatccttcgtcgccagccgttccgaaggcttcgaggagtatcgcaaaatcgtcgaaggttatacgccggagtcggtggaagagataaccggcgtcagcgctcaggagatccgcgcctgcgcccggatgtacgccagcgccaaatccgccgccatcctgtggggcatgggcgtcacccagttctaccagggcgtggagaccgtgcgctcgctgaccagcctcgcgatccttaccggcaacctcggcaagccgagcgtcggcgtcaacccggtacgcgggcagaacaacgtccagggcgcctgcgatatgggcgcgctgccagatacctatccgggctaccagtacgttaagttcccggaaaaccgcgagaagttcgccagagcctggggcgtcgacagcctgccggaacataccggttatcgcatcagcgagctgccgcaccgcgccgaacacggcgaagtccgcgcggcgtacattatgggcgaggatccgctgcagaccgatgccgagctttccgcggtgcgcaaggcgtttgaacagctggaactggttatcgtccaggatattttcatgacaaaaaccgccgccgcggccgacgtcatcctgccgtccacctcgtggggcgagcacgaaggcgtgtataccgcagcggaccgcggcttccagcgcttctttaaagcggtggagccgaagtgggacctgaaaaccgactggcagattatcagcgaaatcgccacccggatgggctatccgatgcactacaacaacacccaggagatctgggatgagttgcggcatctgtgcccggacttctacggcgccacctatgagaaaatgggcgagctcggctatgtcatgtggccatgccgcgacgagtccgacgccgaccaggggacgtcgtatctgtttaaagagaagttcgatacccccaacgggctggcgcagttcttcacctgcgactgggtcgcgccgatcgataagctcaccgacgagtatccgatggtgctctcaacggtgcgcgaggtcggccactactcctgccgttcgatgaccggcaactgcgcggcgctggcggcgctggcggatgaaccaggctatgcgcaaatcaacaccgccgacgccgaacggttaggcatcgaagatgaagcgctggtgtgggtcaattcgcgtaagggccgcatcatcacccgcgcgcaggtcagcgatcggccgaataaaggcgcggtgtacatgacctaccagtggtggatcggcgcctgtaacgagctggtgtcggagaacctgagcccgataactaaaacgccggagtacaagtactgcgcggttaacgttgaacggattgccgatcagcgcgcggcggagcagtacgtgatcgaggagtacaacaagctgaaagcccgcctgcgcgaaagcgcgatgggttaaggttcggcggccttacccgatattcgggatccttccccggtggcgcttacgcttaccggggctaccaaccgaataccgaaccgtagcccggataaggagctatgctccgctatccgggaacctccccggtggcgcttacgcttaccggggctaccaaccgaataccgaaccgtagcccggataaggcgctacgcgccgctatccgggaatcctcccccggtggcgcttacgcttaccggggctaccaaccgaataccgaaccgtagcccggagaaggcgctatgcgccttctccgggtattcaccccgctaattcccgccattttcttcttttccgccgccctttatactgcgggggtcttccttactgataataaaaaaaatgaaatacctctatttactgctggcgctgacaagcttcgccgcagacgctgcggatccgggcagccaataccaacagcaggccgaagctggcgatccgcgcgcgcagttttatctggcggatacctggattagctccggcaactatcaacaggccgaatactgggcgcagaaagcggcggcgcagggcgatggcgacgcgatggcgctgctggctcagcttaaaatccgtaatccgcagcaggccgactatcaacaggcccgacagctagcggaaaaatccgtgcaggccggcagcaaggccggcgagattatcctcgcccgcgtgctggtcaatcagcaggctggccccaccgattatgcgcacgccatcaggctgctgcaggatgcggccaaagatgaagagagcgactccgccgtcgatgcgcagatgctgctggggcttatctacgccagcggcgtgctggcgccggaagatgacctcaaggccgcgcagtacttcaaaggcagctcggcgctttcacgcaccggctatgccgaatactgggctgggatgatgttccagcagggagagaaaggttttatcgaaccaaacccgcaaaaagcgctgcactggcttaacgtcagctgtcaggaggggtttgataccggatgtgaagagttcgacaggataaccaaaggctaaaaaaagcccggcgcgaatggccgggctctgacatcttattgggcggttttatcaaacttgcccagcacttcgcgttcatacgccagcgctttcttgcgatcaaacttatgttcccacttggcgataaccagcaccgccagcgcgttgccgaccacgttcagcgcggtacgcgccatatcgaggatacggtcgacgccggcaataaacgccagcccttccagcgggatccccacgctacccagggtcgccagcagcaccacgaaggagacgcccggtacgcccgcgatgcctttcgaggtcaccatcagcgtcagcacgagagtgatttcctgccacagggagaggtcgataccgtacagctgggcgatgaagatcgccgcgatgctctgatatagcgtcgaaccatcgaggttaaaggagtagccggtcggcaccacgaagctggtgattgaggccggcgcgccgtaggcttccattttctcaatgatacgcggcagcacgctctcggagctcgccgtggaataagccagaatcagctcatctttaaggatgcgaatcaggatccagatgctcagcccacatacccgcgccacgatacccagcaccaccagcgcgaagaacagaatcgcgaagtaaaccaggataaccagcttagccagcggccacagcgaagcgaagccgaaggtggcgacggtcaccgagatcagggcaaagaccccgaccggcgcatagcgcattaccatgtgcgtcactttgaacatggtttcagagatagaacggaaaacggtgaccagcggttcgcgatgggtcgccggcaatgaagagaggcccagaccgaacagcaccgagaagaagataatcggcagcatatcgcctttcgccatcgaggcgacgatattggtcggcaccagcgacaggatagtccccatcaggccatgagcgtggctctgcacctctgcggtggtgttctgatatttcgagatatcgaccgccgccagctgcgacatatcaatgccgctgcccggttggaagacgttcgccagggtgatccccagcacaatcgccaccgtggtgatcacttcaaaatagataatggtcttggcgccgatgcggcccagttgcttggcgtcgcctacacccgcaatgcccaccaccagcgtcgagatgacaatcgggacgacaatcattttaatcaggtggataaagatatcgcccgccggggtcaggaggtttgagattaaccaatcacggctttcggcgtggtaatgcaggtagctgcccagaagtatgccaagcaccagggctagcaaaatctgccaggccaggctgacttttgtttttttcatcactactgacttcctcaatgaaaggcaccattccgggaggtaatggcacccactgaaaggggtatgaattgtgttgcgttgctttatggggttatttaacgcgcaatatcagtatcatttgcacggcatgctgcgcaagcctttaagaacagggctttcctctggttttctgcataaatccgcccatttcagcgcattacattgcataagtatttgttataaaaaatatttaacacattcagtttctataaatccacgctgtaaattatttcacttcaaagtttcatttgattgaatttcattcagtttaatcaatgcgtgatctgccccccaaatagtaaacaaagctcataaagcccctattcttaacggttatttgacatatatttaacaagttaaaggagaaaaaaagccatgagccaaatacataaacaccctattcccgcagagattgcggaacattgcctgatgaatccgcaacagtaccaggtgaactaccaacaatccatcagcaacccagatgccttctggggtgagcaaggcaaaatcctcgactggattaagccctatacgcaggtaaaaaatacctctttcgccccgggaaacatctccatcaaatggtatgaagatggcaccctgaacctcgcggccaactgtctcgaccgccatctgcacgagcgcggcgaccagaccgcgatcatctgggaaggcgatgacgccagccagagcaaaaacatcacttatcgccagctccatcgcgatgtttgccgttttgccaacgtattgctcgatctgggcattaaaaaaggcgatgtcgttgctatctatatgccgatggtgcctgaagccgccgtcgccatgctggcctgcgcgcgcatcggcgctatccattcggttatcttcggcggcttttcgccggaagcggttgccggacgcattatcgactccagcgctcgcctggtgatcacctctgacgaggggttacgcgccggtcgcgccatcccgctgaagaaaaacgtcgatgatgcgctgaaaaacccgcaggtcaccagcatcgagcacgtagtggtactcaaacgcaccggcggcaaaatcgactggcaggaaggtcgcgacctgtggtggagcgatctgattgaaaaagcggatgaccaacatgaagcggtggaaatgaacgccgaagacccgctgttcatcctctatacctccggctcaaccggcaagcctaaaggcgtgctgcacactaccggcggctacctggtgtatgcggcgactaccttcaaatacgtctttgattatcatccgggcgatatctactggtgcaccgccgatgtgggctgggtcaccggtcacagctacctgctgtacggcccgctggcctgcggcgccaccacgctgatgtttgaaggcgtgccaaactggccgaccccggcgcgcatgtgccaggtagtggataaacatcaggtcaatattctgtacaccgcgccgacggcgatccgcgcgctgatggcggagggcgacaaagctatcgaaggtaccgatcgttcctcactgcgcatcctcggctcggtcggcgagccgattaacccggaagcctgggagtggtactggaagaagatcggcaacgaaaaatgtccggtgatggacacctggtggcagaccgaaaccggcggcttcatgatcaccccgctgccgggcgccaccgaactgaaggccggttccgccacgcgtccattcttcggtgtccagccggtgctggtggacaacgaagggacgccgctggaaggcgcgaccgagggcaacctggcgatcgccgactcctggcctggccaggcgcgtaccctgtttggcgatcatgaacgcttcgagcagacctacttctcaacctttaaaaatatgtactttagcggcgacggcgcacgtcgcgacgaagatggttattactggatcaccggtcgcgtcgatgacgtgctgaacgtctccggccaccgtctgggcaccgcggaaattgaatccgcgctggtctcgcatccgaaaatcgccgaagcggcggtggtcggtattccgcataatatcaaaggccaggccatctacgcctacgtgacgctgaatcacggcgaagagccgacgccggagctgtatgccgaagtacgtaactgggtacgcaaagagattggcccgctggcgacgccggatgtactgcactggaccgactcgttgccgaaaacccgctccggcaaaatcatgcgccgtattctgcgtaagattgccgctggcgataccagtaatctcggggatacctcgacgctggccgatccgggcgtagtggacaaactgctcgaagagaagcaggccattgcgatgccgtcataaccttaacctattccctaccccctctccctcttaggagggagaggttaaaaacataaactccccccaaggattctattcagcaggaaagcggtaaatcagcgacgactcgacgcaatagcgtcgggcgagtcactgttgccgacggatagccgatggatgacataagggttacctctggagacgcgaagatgaatgaacaaatttgtcagcggatagaaaatagtgagcatttcagggagttagttgcatcacggcaacggtttgccgccattctgtcagtcattatgttggtcatttacgtaggctttattttgcttatcgccttcgcgcccggctggctggggacgccgctgcatgaaggcaccagcgtgacccgcggcatccctattggtatcggcgtcattattgtgtccttcgtcctgaccgggatttacgtctggcgggcaaacggcgaatacgacaagttgaccaaaagcgtgatcagcgaggtgcaagcatcatgaaaaaagtcctgacggcgcttgccgccacgctccctttcgccgctaacgccgccgatgccattaccggcgcggtgcagcgtcagccgaccaactggcaggcgattatcatgttcgtgattttcgtcgccctgacgctgtacatcacttactgggcgtcaaaacgcgtacgttcgcgcagcgattactacaccgctggcggcaatattaccggcttccagaacgggctggcgatttccggcgactttatgtccgcggcctcgttcctcggcatttcggcgctggtctacgcctccggctacgatggactgatctattcgctcggcttcctcgtcggctggccgattattctgtttctgatcgccgaacgcctgcgtaacctcggccgttacacctttgccgacgtagcatcttaccgcctaaagcaggggccgatccgcaccctctccgcctgcggttcgctggtggtggtggcgctgtatctgattgcgcagatggttggcgccggtaagctcatccagttgctgttcggcctcaactaccacgttgcggtggtgctggtcggcgtgctgatggtgctgtacgtactgttcggcggcatgcttgccaccacctgggtgcagattatcaaagcggtcctgctgctgttcggcgccagctttatggcctttatggtgatgaagcacgtcggcttcagcttcaataatctgttcgccgaagcgatggcggtgcatccgaaaggggcggcgatcatgagccccggcgggctggtgaaagaccccatctcggcgctatcgctcggtctcggcctgatgttcggtaccgcgggtctgccgcatattctgatgcgtttcttcaccgtgagcgacgccaaagaagcgcgtaagagcgtgttctacgccaccggtttcatgggctacttttatattcttacctttatcatcggcttcggtgccatcatgctggtgggagcgaatccggcgtttaaagacgccgccggtcagcttatcggcggcaataatatggcggcggtgcatctggcggatgccgtcggcggtaatctgttccttggctttatctcggcggtggctttcgccacgatcctggcggtagtcgccgggctgacgctggcgggggcatcggcggtctctcatgacctgtatgccaacgtgttcaagaaaggggcgaccgaacgtgaagaactgaaagtgtcgaaaattaccgtgctgatcctgggcgtggtagcgattctgctggggattttgttcgaaaaccaaaatatcgccttcatggtcggcctggcgttctctatcgctgccagctgtaacttcccgattatcctgctgtcgatgtactggtcgaagctgaccacccgcggcgcgatgatcggcggctggctcggcctgctcactgcggtgattttaatgatcctcggcccaaccatttgggtgcagatcctcggtcacgagaaagcggtcttcccgtatgaatacccggcgctgttctccatcgccatcgcgttcatcggcatctggctgttctcgattaccgataactccgccgaagggatgcgcgagcgcgagcagttccgcgctcagttcatccgttcgcaaaccggtatcggtatcgaacgcggacaggcgcactaagcatatcagcctcttcctcgccttgaggaaggggctgtgttttagttataggtaaaggttatcaccccgctcgcatttgccggccccgccgtcacctcagcccccgtcttataatagttggcggaaaacgataatgtctgcatagcggtagcaccgccggggctatcaggatgagtaaagacggtataaccggcatccgcgtcgctattggtcaccgtcgtgcggcttgaagaatacaaactgatatccgtattcaacggtagcgcctcgtcattcagattgagctggacgccaacgccggtggcgacattgctatctgccgtcagcgccatcaccgtgttagcaggattatcaccgcccgcttgtgccgccgtcacccgcatcgatacgttagtcccgggttcgcaggagagcgtgaccgactgccgagctgagcccactttcgtcgcggtattaaacgccgaggcgctgaccgtacccatctcgaagttcagccccgagctattggttacacagcccatcggggtcagttgaatcgtggtggtgccgctaatatgcagttgcgaaatcacgatagtgcctgtgctatctttcgcagaaaccgtagcgatcggatcggtcaaagacagtttactatttgtcgctattggaccgcctgtcgccactaactgcagctgataagcgggtgaataactggttgaagcataataatccagtaccccggaaggtttaccaagatagtaattagcatcaccaataaaatgcgtctgatagtcactactgaaatcaccactatcgccgtcatattccccggtaatgtttagccagactttgactctcaatccaacgccttgtaacgaggtggtatagatattatcaccgagtaaactacctgcattatttgaggcccactgaaagagagcgtagatatctcctttacaattagttagagcggttgacgaatgagttatttttcctgagtcatataatactgttccggctgagtaattcccggcactaactaaaatcttctcaggtaaattagtcatggatatatcaccgtaattttccccgccacacccccagctaaactcagtaaacaggaacagagctagccagataaattttttcatgcatcctcctgcatgtaatagttatttataggtgacatcaaaggtcgcggtaaatcccacaatgccagcactaatttttccgtagggtgaatacattctggcgatcatgttaaatgtatgagcgccagcactatcatcaaacgtataaacataccgatcgttcggccctaatggctggttatccgcctggcttagcagttgcattccgacaccgctggccccatcactaccggtttgatagtttttataaattgaagcatgggcatcatcaaaataggagccactgaaggataaggtgaccgtagagattcccgcggagcagttactaaactcaagcttaaccggcgtgctttccccactagaacccgctttaccggtaagcgtttgatacgacaccgtgcctagatcaatggtggtagagggttttatttcaacgttacaggatggctcctcaatgtttccggaaacattaaaattgagcgtacttgaatcctcataggcgaaaactggtggcgaaataacaaacaacccacaaattaaataacctaataaacagatcaagataccgccaatatttttaacatcacccattataaaaccccattgctttgagcaattgcataaattaatgacacagtgtttgataaaaaataatctcctggcttttttctctacccgtcaaatcatagtttgcgcggcattgttcattgtctccctcaccccatttcaccagcatggttcctttttgctgaagccctgtcatataaacctgcccgtcatcaccaacaatattgctgcgaatatcctggcgccgttgcggctgtttttctaaagtcacaatggcgccgaacggcgcgacgccggtccgcgtctttaaagtgactatcgctttcgctccaatataagtatcgtattgcactctcactatcgcgttgcgcgtcggtaccacgtttttcaccacattatcgatctccgcacctgcaatctgctgttcatccaatgacaggttattaatatggtacggccgaatatatggcacgattgcgtaacctgtggaatcggtagtgacattggtttgtccgcgtaccgccacatcacccacaccgggcgtggcaatcagggcggaactctcgccgaggaatcgggaaagcgtgagtccaccggcgtgggcgatcatgcccccgcgtaatgaatagttataatggttgctataatggtcatagccgtaaccgccggaaatatctcctctggaactctgataatccacgccaatatttccggaagtgcttttattactggcgttataaccttgctgaatattccagttaagcgatcgatccgccagcatcatgccgttcagtcctacgctgtgggtagtgtcgctggtacggccggagctcatgctgtagttagatgagagactctcgccgagcggcagagacagcgttaaagacacaagggtatcgctgtcaggtttagtctcggtactattttcgctactttgcacgtttcggttatatgagtaattaataaaatacgagacttttcccacagacccgctatagccaatacccagagactccattcgcgaactatcccagtaggtttcattgactaaagaaagcgacagagaaccgtgtccaaatagtgattgcgatattgaggcatcaaagcgcccttttttccggccatttaaggtacaacaatcgcggtcatttgaggcattatcgataaaatcctgaaaggagtaatatcccgcggtagaatagcgataacccgcaaccgaaaaattagttcccgtccgtataaagctcttactaaagcgcagacgtaaggattgtccttttttttgcgataacgtagaacgggtttcgttttgtttaatatctgccaatgactgagaagcgtcaaacgacaacgcgccaatactgcctaagttaaaaccagaacccattaatatattagtatatttatcttcagcctgttgcaatccagcatataacgtaatattgcttgaaacgccgtatgccgctgtcgactggataaaattatattctttatcgccagaactggtcgcgcgcgtttttccgctactaaaggcatagtccaactgcccctctcgctgcaaaatggcaagcgacgcataaggcacaataaaattttgctcactaccatcggactctttaatattaacgttgagatcgcctgcgctccccgttgaataaagatccttaatctcgaaggccccgggggcaactgttgttttatagatactgtaaccattctgataaacggtgacctcagcggtagtacgcgcgatacctttaatcgttggcgcgaaaccatgcagactgtccggcagcatttccttatcagagcttagttgcagaccagtaaaattcatactgtcatatatacctgatgaggtatacgtattacccagaacgaattggcttctcaaggtatgaatatcgcgagcaagatagctatacaccgattgccagtggctgccgtcatcgccatgatcaaacgtgctatagttgcgaaggcgccacggccccagatttatgccaggctgcaaactcgcaaactgactttcggtggcgctaccgccgtgccgcggtgtattccattgccccgacaaactgtagttaaacaaacccgcgtttattccttgctgccactgttcttccggaacatagtctccagggcgattaagcaacgccgcctgcggcacagaaaatgcgaggcgctgctgcgataacgatacggagtattcaaggccaggaataacagacagacgggcacaatgcgttgccatatccgctaactgcggataacgctcggtattaatcgaccatgatcttaacagctcaacgccaatgcagggttgaacctttatctgctggttatccgtgttttttttaaattcaacaacctcggaagatatatatttatcattaatataaatatccagattataactgccgggaggaatggtatcctgagataaccaggataaatccacagcggtagcactactttcagtcacttccagtaaatgagggttgaagtattctccggcttgcgcgccagaacttagggtagtaacgtatagcagaaatgctactccgatataccctggagtctgaaacagagcaatgctactgtatgattgcggaatattttttccctgccatgccataatcattaatcacgctccatgtgatttctttacttcccgcagaggataaaacagcttttgccggtatctttaacgtagaaaatggtgcaacgaaccatattccagatatattctgaccactaatctttatttgtgagaagttcatatacaatggtgaataatttataacactataaaaattgctatcgcggcgccattgtaatttatccgcatagttttctggtatttggccctgtagttcttttggacgataaataagtttaattttagagttaatggcaaactgcaccgtatttttatctggcatattgtccatcgcgggtatgcctttaacatttaaccagagcatagactcgcgatctgttggcaatggtttccctgagcgcacgatccggacaaatcctttctctcccgaatttaatcgaaatagcggtggtgtaataataaaagcgtcttttactggcgatgacgtatcaacgacagaaagccaggactgaacaatattagtagtattatctttattatcaacaccaaccaccgtactctctttggcgccatcaaatatcacacgagtcgcgcccaccaccacgctcgcttgtgcattcgaaaaagttagcaataagctaataaagaataaacaatttctcatatatccctaaataaaggggaatctacactcagctcccctttctccgtataaaataaattaatagtaagtcacgttataggtcactgtcgtatttaccgtacctttcgtaggatcagaagcgcctgacttgaccattttcacagtaaaaggaatagttgctgccccggatgaaatatcgacatcggcaccttcttcgttatttttcagtagattaccctcgttatcaaaaatggcgaccgcaacgccggaagcagcagaactcgtggcctggtttttgaagtaatcactgttcgcagcatctgcctcgccaccgaaggtgatgcgggcggcagcgttgcccccttcttcagtagcaggacagttagcgagtgaaaatgaaaaattcttcgccgcaccaaaggtattcgctttcaagtccgccactgaagtggtacccatttcgatagatgtcactccaccatcaattgttgcggtacaggtggtatcagaaacggtaccgttgaaagtgatagtattcgatgcagcttgtgtaaaagtcgacagcatgcaggaggcagtaattgccagcgcgcttaatgcatatttcttactaattttcatatgaattcccatatccattgtaaatgacaatcaatccgtcaattgcttcatgcaggtatattagagaatggaattcaatattcgcattacaaatgcgtcatgcaaataatgataagatcaatttatacccgtcatacttcaagttgcatgtgcgttggctttcctgcaactcgaattatttagggtatatttcactacgtggtcactcatagaatccattcaataataatagcccacgtaaaaagaatatcgtgcagaaaatatttttcaataagaagagctaacatcacttattagctgagattcatcacctgtcatcacacaatataaaaccataaacatcaaccaattagatacactttcagccataaagaaagttaatgcattttgatggattcggaataaagcctaaacactttaaatatcaattaagccaaacgtcttatatatacgtagtttcttaaatcattctaatatcagcagccttacctgctgcactttgaggtaaaactgctgaatattaaaatattgcccagcgtactagcggcgccgccagaaccattaccacgccggagagcatcattaccaggctggcgaccacgccctcctgctggccgagttcgtaggagcgggcagtcccggcgccgtgcgacgccgcgccgaacccagcccctttcgccattccggcgctgatcgacaggcgtaagaacagcacgtcgccaatggccatgccgaagactccggtaaccaccacaaataacgccaccagatccggttggccgccgagcggtttcgctgccgccagcgcaaacggagtggtcaccgagcgtaccgccaggcttcgctggatctcatcagaaagagtaaatagacgcgcgagccagacggaagtggtcaccgccaccaccgaagccgtcacgacaccggcggtcaacgacatccagtgacgcttaataatcgctatgttgtcatagaccggtacggcgaaggcgatggtggccggccccaataaccacaatagccagtgcgactcgcccatatagctctggtaggaaatatgaccaaagacgaggatcagcaccaacagtaccggtgtgagcaccagcggcatcaacggcagtttgtggaagcggcgatagaggcgtttattggcgaaatagagcccgagggtgaccgccaggcacagcacgctcagggtaaaatcactcatctttcaacctgctcacttcatagcgatagaccttatccactacccaggccgtggcgcccagtaccatggtggtgcttagcccgatgacgaggaagatgcgccagccgtctatcatcagcagttgcgcatagttaacgacagcaaccaccgccgggacgaaaaacagcagcatctccgccagtagccagcgcgcgcctgcacgcacccagtttagcggtatcacccggcagacgataagcatcagcagcatcaacatgccgacaagattggcaggaagcgggagatgtagccaattaaccagatattcagcgcagacaaacaacccggcatagagcagtacctgaaccggtacctgaagacgttgcatcacgaaaggcgcaacacgtgctggcgcgaaggccatgagcggaattccctaaaaataagtcaggggtgcagtatagagagccgcccttgcggacagaaatgaattaaaatcatcacaggtatagtctcagggaataatcatggatatacgtacgttgcggtattttgtcgaagtcgtccgccagcaaagctttacccgcgcggcggagaagctcttcgtcacgcagcccaccatcagcaagatgctcaaaaatctggaagatgagctcaattgcaccctgcttatccgtgatggccgtaagctgttgttaaccgataccggccgggtagtgttcgaacgcgggcaggcgatactcggcgaattcagccagttaaaagccgagctcagcgacatcaaccatctaaataaaggcgtgctgcgcctggggatcccgccgatggtcggcatgttgatggccgagcccatcagccgctttcgcctgcgttatcccggcgtggagctgaaaatctccgagttcggcgggttgacggtgcagcaggcggttagcaacggcgaactcgatctggcgatgaccgcgctaccggtcgatgaggccagcgctctgaccacgctgtcgctcttcagccatccgctctgcgtcctcgtaccgaagacggcgcagtggcagggtatcacctcgatctcgccgcaaaagctggcgcagcatccgttggttatctacaacgaagatttcgccctcagccagcaactgatgcgcctgtttgccgagcatgacgtgaagccgcgtatcgccgtgcgcagcggccagtgggattttctggcggcgatggtgcaggcgggcattggcgtagcgattttgccggagccgatttgccagcggctggatgccgaggatttttactggatcccgctggagagcgaattacgttgggaattagggatgatctggcgggaaggagtgtatatgtcgcgcagcgcccaggcgtggctggagtgcagtaagtcgttttggctggagtaactccccggtcgcgctaacgctcaccggggctacatatagactgtcgatactgttatcggttggcaactttttaaggatttttcccggaggcggcgcattgcgccttctccgggctaccaaatcgcacagcgctgtagccccgctaagcggcagcgccaccgggggattttgaggccattggtaccggcagtttcagccagcatagtgaataaattaaaggcaggccgcacggaccgtaggaccgaaggtcgggtaaggcgttagccgctacccgacaaaaaacggcaccgcgagtagccccgataagcgtcgcgcttaccggggcgaaggttactgatcttcgattaacagcgcttctaacaggtcgagatcgtgcagcagtttctgcaacgtctcgttgctgatttgccgcgtcgcgcgcaggtggtacagctcgccgcgttccgaacgcagcgccgccagacggaaacggcgctcaaggctctcttccagcatcgaggtttcgacatcgttacgcccatctacgcggcgacgcaaattaccgatgacacgcgaactcacctcggtcagcagctggttgtcgatattctctttggtatccgccgccaggcgttcttccattttctgaatcgcgacaatcgccacatccgccgtcgcggcgcgcgccagacgctcttctttgcgctgctgtacgtggtcggtggactcaatacgccgcagcagaatcggcaacgcgatcaccccgacaaacagggagaaaagaatcaccccggcggcaaggaaaataagctcgtaacgcgccgggaagacgttgccgtccggcagcagtagcggaatcgatagcacaccggcgagggtaatcgccccgcgcaccccggcgacggaggagatcagcagctcgcgggtggtccaggagccaaactccatcggtttcttcttcaggaagcgctggctaagcttacgcatcgtccacagccagccgaaacgcaccagcatcagcgcggcgtaaatcagcacgatatcggtgaacagcatccaggtttcaacgttcggatcggcttccgccgccaccagcgagctcgacaggatatccggcagctgcaggcccaacagcaggaacaccatgccgttaaacacaaactccagcatggcccaggtactgttggcgcgtaggcgcatagccagcggcgcggtacgcatcaccccggaacgggtgatagtcatacccgcggccaccgccgccaggatccccgagaaaccgatatgttcggcaatcaggtaggaagcgaacggcagcaggaacagcagcacaatttgcgttgccggttcatcgccgccccagcggctgaggaaacgcattgagcggccatacaaccagctgaccacaaaaccggccaggatgccgccaatcgccaccttcaagaactcaacggttgcgccgccaatggtgaacaccatcgtccccatcgccacggcaacggcaaattttaacgacaccaggccagaggcgtcgttcatcagcgcttcgccctgcaggatgcccatgattttcttcggtatccgcccttcgccaacaataccagacagcgccacggcatcggtcggcgacagcaccgccgccagggcgaacgccggaaccagcgggatccccggcacaatccagtaaatcaggaagccgataccaaccacggtaaccaccaccagcgccagcgccaggccgaagatttcccgcccgtgctcgataaattcgcgggtcggcgttttccagccatcggcaaatagcagcggcggaataaacagaacgaggaagagttcagggtcgaactcgacgtgcaaaccaaaggtcggccaggctaacagcgcgccgatggcgatttgcattaacggtagtggaacctgaaagggcagtacgcgtgtaaccaccccggagagtgagaccacaagggtcatgatgagtatggtgaagaatatttccatgtgttccctgtttgctgcgttttctttttttacatctgaggcgtcatgtctcgaaatgatacgctactcagattaacgcaaaaggaaacaggatgtggcttaaaaattaaacgggcggccaaagccgcccgtcgttagcaggaaaagttaaatcgcccagccgccggcatagaagataaccagcgccgccgcgatgatcacggtgcccgcattgagcttacgccactcgccggataccacgcggccaatcaccaacgatgcgaaaccgatcataataccggtcacgatgttgcaggtcagcacgatgaacaccgcggtaatcagccccgccatcgcatcaacgaagtcattgaagtcgattttcgccacgttgctcagcatcagcaggccaacgtacatcagcgctggcgcggtcgcgtaggccggcaccagataggagagcggagaaaggaacaggatcagcaggaacagcacgccaacggtgacggccgtcaggccggttttaccgcccgccgccgtaccggccgccgattcgatatacaccgccgcaggagccgcgcccaccacgccggagaacacgctgctcagggagtcggtagtcagcgctttgccgccgttgatgatctgcccgtctttatccagcaggttagcctggccggccaccgcgcgaatggtaccggtagcatcgaataccgcggtcatgaccagcgccagcacgcttggcagcaccaccggattcagcgcgccgatgatatcaaggctgccaatcagcgaattgcctttgtcatcgctcagcgacggcatggcgaaaatcccggagaagtggacgttcggatcgaaaatcagcccgataattgataccccgatgatggtcagcagaatgccgcccggcactttcagtttttccagcccgataatgaccgccaggccaatcagcgacatcatcaccgggaaactgtcgaagttgcccagcgcaaccggcaggccgtccagcgggtttttaatcaccaggccgacgccgttggcggcaatcagaagcaggaacaggccgataccgatgccggtgccgtgcgccacaccctgcggcaggttgcgcaggatccagctacgaataccggtagcggagataatggtgaacaacacccccatcaggaaaacggcgcctaatgctactggaatgctgatgtgctgccccagcaccaggctaaaagcggtaaatgcggtcagcgaaatcgcgcacccgatagccagcggcaggttggcccacaggcccatgactaatgaaccgacgcccgccaccaggcaggtcgacacgaacaccgctgccggcggaaaacccgctttccccagcattcccggcaccacaatgaccgagtacaccatcgccaggaaggtcgttaacccggcaacgatttcctgacgtacggaactgccgcgagctgaaattttaaaccaggcgtctaaagaaccgccggtacgcgctgaaggcgtagacatagaaaacttcccctgaaaattttgatcgttcgcgtgtatgcgtgatggaccgtccactgccagttaaacgccatctccttgtgctgtttcccggcgccaggagggaggctgagaaaaagcaaacgtttaactccgcgcatacaatgcggtatatggaatgtctttgctccccctgtaggcaggggaaaaaacgagcaaagtaaaaaggcaaacgattatcctgtctttagacggcccttttcaactgaagtttgtcgtattttgccaaatttcgccgccaaagctcaggaaatagacaaacgatgcgcaaacgttatcgtcaatgcgcaaagcattaacatttttatatgttttaatccgctttcaggcgcattaaccgccaggtagggtaaacggcccgccgcgctcaatagcgctaatccatgccggacgtgactcaacctgctgctgccagcgccgtgtatgcggcaagtctccaacaccgccgcgcgccagtaacgccatcaccgggaagctcatctggatatccgccatactcaacgcactgccggcaaaccacggctgacgggccagatgctgttctatatacgccgcgtgggtcgccagctgtttgtccagccacgctttttgcacccctttgcccaacgccccgcccagcgtgcgcatgccaagcggcaccggcggcttgccgaggctggcgaagataagcttcatcaacaacaaaggcattaacgatccctcggcataatggagccagaagcgatattgcagtttctcttcccgccccagcggtctgagctgctgggcgctatcgtaggtctcctgcagatattccagaatcgcgccggactccgccagcaccacgccctgatcctcaagcaccggcgatttacccaacgggtgaatttttttcagttccgctggcgcctgcatgtttttttcacgctggtagcagactacctgataggacaattgcagttcttccaacgcccacagcacgcgctgcgagcgggattggttgaggtgatggaccgtcaacatggcgctctcctgttgttcgttcaaattaactatagaaacaggcggccaatgacggaaaaatttcggcaacgtcaacaggcaaaatcagcaggctgtgccacaattacattgtcgacgcaatccggaacctccttcaacacattgcgcaatacctgaggggagtcgacgtcgggggaaaccctcccgtgagccagcgggataatgcgaaagacaaagaccggaaaacaactaaagcgccctgttgtggcgctttagtttttttgcaggcatcaccattaatcctcttccagcaggcgtgcgccggtcccctcttcacccaacttatctccagggttgcgtaacggacaatcgcggcgcgataaacagccgcaaccgatgcagccgtcgagctggtcgcgcaacgcggtcagggtgtgaatacgccggtccagctcctcccgccattgcgacgacagctgtttccactctttggcgctcagattatgcccttccggcaggacgccgaatgcctcgccgatggtcgccagcggaataccaatacgttgcgcaatcttgatgatagcgaccgcacgcagcacatcgcggcgatatcgccgctgattgcccgcgttgcgctggctgcggataagccctttgctttcataaaagtgcagcgccgagacggcgacgccggttcgtttcgccacttccccaggggagagcagcattttgatacgggttggtttcttttccataaaagcgctttacctcaagttaacttgaggaattatactcgccagcagacaaaacgacgaatcgagaattgagagaggccgctttatgtcccatcaggatattatccaaacgcttattgaatggattgatgaacatatcgatcaaccacttaacattgatgtagtcgctaaaaaatcgggatactcgaaatggtatctacagcggatgttccgtaccgtcacccaccaaacgctgggtgattacattcgccagcgccggctactgctcgccgctgaggcgctaaggaccacgcaacgccctatttttgatattgcgatggatttgggatacgtctcgcaacagacgttctcacgggtgttccgccgggagttcgatcgcactcccagcgactaccgtcatcagatttccgcctgacgaccgtcgtgcggcggacgcagtaagatcggggatttcgccagccactggataaactcctgtggcggcattgccctggcaaaatgccaaccctgacaaaactgcacgccgcgcttaagcaaccaatccacctgatccagcgtttctaccccttcagcgatggtttttaaacgcaggctacgcgccatgtcgatgatatgctcggcaatcaggtggctggtgctattagtcgtcagcgtatcgataaaagatttatcaatcttcagaatatcgacgttgagcgaatagagattgtgcaggttggaataaccggtaccgaaatcatcaatagctatctcatagcctgcttcgcggaaagcctggatcaccggcgtggttttcggcacatcgataaaccccctttcggtgacttcaattttgatttgcttcacgcaaactgcatagctgcgcgctttctcagtgatctgtgcaatcaacctcgcggagtggaaatccgaggccgaaagattaatcgcgatatagagctgcgggtgtcgggacaaatattcgccaagatcgttgaacaactcgtcaactacgtaatctgtgacctgagcaatcatgcctgagttttccgccaatggaataaactccgccggactcatgaccggaccatcaaatcccggccagcgtagcagcgcctcggcgccgacgcagcgattattcttaatgtcgataatgggttgataatgcagacatagctggcggtggcttaacgcccgcaagagcttattacgcggtgaatgatactgctgacggctgcgcgaccataccatcagaatcaatatgctgcagatgatccctaacggcagggtcaaggtgacctgatcgtacaggctggcataatagctggcgcgcgaggtggacatgatgaccgcaatcggccgaatcgaggaatgagcgacggtataaacccggccatcctgattaaaaaaagcgtcttcgtggcggataaggcggtgtagttccctggcatcaacgtttttactcaccgagaaaaacatgttcgttttggtatcgaagacgccgtaggctaagtctctatcactggaaataaccgagctataagagagaggattaaccaccacggcataatggccgcgctgcatataattcatatcatagcccggataaaacggcgtatcgcggtagtagtaaatagagacgtcgggctggcgggtgtaattcgccgcggctattctccacccctcttcgggatgaactgcagtagaacagatgaatttgttaccgttcgcgtaaatcaagtcatcgacatacagcaatccgcggacaatattcaacatgtaatgctgatgctgcggggaacacaattcccctgtaaactgcatggccttttcgcgcgcctgctcggattcatgaatgaccatttccgttttttgcaacgccagctgcgaaaacgactgcaatctatcggagatttcttcccgggctctaatttgcgcgaaccacaacgccaacaccaccggcagcacaaccaccagtatggtgaagaatattttgaacgccttatgcggcgcgctacgactcatttccgctttttatccatgcgatacgcctcaatcacggtataagggcaaaaaccaggcattaccgactgttataaaaaacagcgaatttcagcaacgaacacgtttatgtaaaaacctcacacctaataatgatgaatcatacttacttatagatggatcgagaaacattctcgtaataattaagacactagccacttactaattcggtttctccgtacaattactcgtaataagtaacaaaacccgtagaacaattatcggcagtctacgcccagcccttagcagcgtcgaaaaacagacgccagacaagctggcgtacatcccctcggcattaaccgcagttattttatggtttttaaatgtcaaaaaaggtcattttttgtctggcgaataaatcagcaaatgtgatatagttcacacaagttgatgaaacaaaactatcgtttcatcactccctgaagtgcccccagatagccagagcgtctcattaattgataatcgcgccaggttgtctaaggcccccgactttcattgagagataggataagttaatggcttccattactaccagtgtcgttcttttgcgctggcccctggtgagcgcagtattgatgttcctggccagctcgctgaatattcaattacgtaaaagcgactatgccggtttagcgattatttgtagctgtctgggcctcgctgccgcctgttggtttgctactggcttgttaggcatcaccatggtggatgtcgccaaaatctggggcaacattaaagacgtcatggttgaagtcatgagtcagacgccaccagaatggccaatgatgatgacctgataaaaaagcttcctacgggaagcttttttattttcagcaacagtgaggaccttccccgtgcccccggctaatattgttcgcataactgcggccgtagacgctcgtttgggcagcgcttaactgcacaatatgattgataaagacaagatgccggctccgcggcttcaaaattgtacgggcagattggccgctctcttaacgtttcccactgtttatcgtcataacgcgtaatgttataaatttttaatgaatgatattgatcattaattaaaactttagaggaaaaaagtttcattgtttcaccgggaagcaataaaagatcggcttcataccagataataaacttcagaaaccgcagccccgatattgacgagaacgcaacgccggtatgcgggcagataagggtgttaagaatagtccatttcatcttccatccttgtaagtaaaatctgtgacggggaatttagtgatagcactcctggtcgttatctgcaaggtagcttattaatagtgtgatatagaacgaggctggtacacatcggtcataccactcatgaagtaagctaatccgggctttatacgaattttgtattaatactaaaaaaacataaccatgcagaggctataaataaccttacaatagattttaaataacagacaaaaatatcattttgatagtccatcaggttaaataagtgattagcgatcacaaataaaaaatattctacagggagggccgtacctccttcttttgtattatagcggaaacggtaatacctcttccgccgtaccgacgcaatggaggtaagcagaaaaagacgcgggagagcgtatgaattgtctaaaatataaccatctccctgcagagtgtcgcatcatgaacatcttcggttttcagcgtcgcctggcgacgctttccgcctgccttctcgccttactgtttgccgtctcagccccggtatcttcgacggaaaaaccgccgccgttgcaaaatgataaagctgaactggctatcaatatggatcacatcatgcagccgcaaaaaggcgatcttcccgacatgatcaaccgacgggcgatccgagtgctaacgacttacagcaagacattcttttttatcgacaaaggtacccaacgcggcgctacccacgatcttttcatcgctttagaaaaagatctcaataatcaactcgcaaaagagaagaagctgaagcagaaacacctcaaagtgcggatcgttttcatcccggtcactcgggataacctgttcaaagcgctaaatgaaggcaagggggatatcgccgccgccaatctcacgattacctcgtcgcgtcaggagcaggtcgcctttaccaccccgctctatagcgatgtcaaagaactgttggtatcggggccatcatcgtccgacgtgaaaaacctggagcagctttccggtaaaaccgtgtttgtccgccgctcctccagctattacgaaagtttgcagacgcttaacgcccgcttcgctaaagcgtcgctgccgccggttattctgcaggaagcgccagaggcgctcgaagatgaggatcttctcgaaatgctcaatgccggcctgattcccctgatcgtagtggatcgccataaggcgcttttctggaaacaggtgtttccaaaaattcaggtgcatgacgacattgtattacgggatggcggtagcatcgcctgggcggtccgcaaagataacccacagcttctcgcggtactgaataatttcgtgaaaaataatcgtcaaggcagcaccctgggaaacatgattctgctgcgctacctgaaaagcgcgacctacgttaaaaacgccgcagccaacagagagcgcgctaagtttttgcagatggtggaaatttttagaaaatatggcgaacgctatgatgtcgactggctgctgatggccgcccagggatatcaggaatcgcggctcaatcaatcggtacgcagccacgtcggcgcaatcggcgtgatgcaggtcatgcccgcgaccggcaaggaattgaaggttggcgatatcaaaaaaatcgaccccaacattcatgccggcgttaagtatatgcgctggatgatcgatcattactatggtgaccaaccgatgacgccgcttgataaggcgctgttttcgtttgcttcttacaatgccggcccggcacgcatcgcgcgtctacgtacggaaacccaaaaacgcggttttgacccaaatatctggtttggcaacgtcgagaatctcgcagcagagaagatcggcgctgagacggtgacctacgtcagcaatatctataaatactacattgcgtatcggctgattatggatgatatcgcccgtaaacaaaaagcgactgccgcgccgctacccgagccaggaacgggcaagccgcagcccgacacagttccgccaaccgctcctgaagcttcggccccggcaacctgagagcctgaaacgaaaaagccccgaacactcggggctttttgttggctaactgcataggcagtaggtaataaggaaaaccttaaaagtgttctgattacctgtgaattaaactttaatataaaaatacatctaaaccattatgttaatttatttttaattgtcttttgtaatatttttcaatggttttaatgctgctatatggagaaaactttatatttttgaactgcaactggcgttaatggaatggttgtcctcccccaaccgtatctccatcaccttctggctggacgatgaagtggttaaggcatggtacgaagctgcaacaccgtcatcacgggggcgacctcagcgctattctgatctcgccatcaccactgttctggtgattaaacgtgtattccggctgattctgcggactgtacagggatttatcgattccatttttgccctaatggacttttccctgcgctgcgcgattacgatgctcaggtagctgaggctctggtcatagtgcgtgcattgaacaaaataacaaaggccggtatgccagaaagcgtgcatattgccagaaaacccgaccgctacggggatgcttacccaaaaactgatctattcaacaaagccaacggaagatcttacccactacagacacggtgattacagctaaaatgatggaaaaaagtccaagaaaaatgagcagggaaaggaggggattaagcagcccccccagactagtgaaatcactaacccgcccgagctgatccgatgacaatgtacgtaaaatgatctccggtataatgagaaagaaaataataacaattggaacataaatcagcagtttttttgtttttctcatcttccttcttgccctctctggcaaccatgataaattaatgaatgataatgatacagcaaggctatataaaatggcacaaacctatttgcaattgaaaatgcaatcaaacaagcaattagctattacattaacaaactcattaagaaacattcacgccaaccatatgtctaccatcgaaaagggaaaccaggcgcagagcggctagtcaattatagcgcatgccttatgccagacgaatactatcgcagttcctgccgtgacacatggcgagaggacaaacgattggttatggccttaggtgaaatttatgacagaggcgatgtcactctggacatggttgaaatatattttcggaaaactcttaccaggctcggcgagcaaaaaagcaatagcctcgtagcccacattcaaaaattgttaggcaaagcagcagaacattcgtcagttaaagccagcaagttagcgctgtcacttaccattgctaatttagtcattagcagcagggattttaaacagacccatatcaaactcgttaattccttttcggcatggtttgtgaacggaacaacgctctatgctaaagcacagatagccgcatccgcagctaacagactcaagtttcaggatcctgcttactatcaagcactgtataaagaaaatattgaaatgctttattttcttattgagccgcaaatgtcggagataatttatcaaataaattctggagataataacgaagaaaaaatcggtgatgctttgtatgagatcttgagaaaatgaagcgtgcgttcctgtggcttattcagtcatttttctacctggtacctgccgttcttattgtcgcggggatttatatttttgtgcgttttatcccaaattacgcggcaatactgagcgccctgtggatagtcattgtttctattgtctatataaaatacaacaaatggtattagtggttatctgtagatagaagtcgcatatctttgctgcattattatctcttcccggaaacattgattcgaattcgttaaatacctccaggcttagaaatattgtgtagccgttttatttaggctaagtcggcaattaactaataatcctcctgttttgaaacttggccactcaacatactgagtcctttatccaatgctgcaattcccgtattcattttcttgaataagattatctggcaggggcgttgcacagcagttcaggaaaggtcagctacgtgagcggcagtagtattaattatcagcctgtgggaacatctgaaagcgacgtatcgccgggcaaaaacgataacgcttatcttggataactttattattcacaagagtgagaaaacacgaaactggctgaaagcgaacccgaaatcctggatagtttatcaatcggtatactcaccatgggtgaaacatgtgagcggttaaccatataggacttgcaatggctggcgcaaagtaggttatttccccgcaaccagccttttcctgacatgctacactcccctccctctttcgaggttcaaacccattactgggtaaggataagtcaggcttgcaataggctttccaacaacccatgattaactcagaatattgagttaatcatttgatttagaaagaaaaactgcgcacttagaacggaatatcgtcgtcgaagtccatcggcggttcgttagatggcgctgccggggcctgctgctgcggacgagactgcgcgccgccgctgaactggttgccgccctgcggctgctgag
